(19) United States
(12) Patent Application Publication
(10) Pub. No.: US 2018/0273915 A1
(43) Pub. Date: Sep. 27, 2018

(54) Recombinant Host Cells For The Production Of 3-Hydroxypropionic Acid

(71) Applicant: Novozymes A/S, Bagsvaerd (DK)

(72) Inventor: Monica Tassone, West Sacramento, CA (US)

(73) Assignee: Novozymes A/S, Bagsvaerd (DK)

(21) Appl. No.: 15/537,732

(22) PCT Filed: Dec. 18, 2015
(86) PCT No.: PCT/US2015/066835

§ 371 Date: Jun. 19, 2017

Related U.S. Application Data
(60) Provisional application No. 62/094,328, filed on Dec. 19, 2014.

(51) Int. Cl. C12N 9/04; C12N 9/88; C12P 7/42; C07C 51/347

(52) U.S. Cl. CPC C12N 9/0006; C12Y 101/01059; C07C 51/347; C12Y 401/01011; C12P 7/42; C12N 9/88

(57) ABSTRACT

Provided herein are recombinant host cells having an active 3-Hydroxypropionic Acid (3-HP) pathway wherein the host cells comprise a heterologous polynucleotide encoding a 3-hydroxypropionate dehydrogenase (3-HPDH). Also described are methods of using the recombinant cells to produce 3-HP and derivatives of 3-HP (e.g., acrylic acid).

### CROSS-REFERENCE TO RELATED APPLICATIONS

[0001] This application claims priority from U.S. Provisional Patent Application Ser. No. 62/094,328 filed Dec. 19, 2014, the content of which is fully incorporated herein by reference.

### REFERENCE TO A SEQUENCE LISTING

[0002] This application contains a Sequence Listing in computer readable form, which is incorporated herein by reference.

### BACKGROUND

[0003] 3-hydroxypropionic acid (3-HP) is a three carbon carboxylic acid identified by the U.S. Department of Energy as one of the top 12 high-potential building block chemicals that can be made by fermentation. Alternative names for 3-HP, which is an isomer of lactic (2-hydroxypropionic) acid, include ethylene lactic acid and 3-hydroxypropionate. 3-HP is an attractive renewable platform chemical, with 100% theoretical yield from glucose, multiple functional groups that allow it to participate in a variety of chemical reactions, and low toxicity. 3-HP can be used as a substrate to form several commodity chemicals, such as 1,3-propanediol, malonic acid, acrylamide, and acrylic acid. Acrylic acid is a large-volume chemical (>7 billion lbs/year) used to make acrylate esters and superabsorbent polymers, and is currently derived from catalytic oxidation of propylene. Fermentative production of 3-HP would provide a sustainable alternative to petrochemicals as the feedstock for these commercially-significant chemicals, thus reducing energy consumption, dependence on foreign oil supplies, and the production of greenhouse gases.

[0004] 3-hydroxypropionate dehydrogenase (3-HPDH) is an enzyme that converts malonate semialdehyde to 3-HP (FIG. 1). Certain 3-HPDH enzymes utilize the cofactor NADP(H) (EC 1.1.1.298). However, it may be advantageous with some engineered metabolic pathways to express enzymes that utilize the cofactor NAD(H) rather than NADP(H) (e.g., to improve redox balance).

### SUMMARY

[0005] Described herein are recombinant host cells having an active 3-HP pathway, wherein the recombinant cells comprise a heterologous polynucleotide encoding a 3-hydroxypropionate dehydrogenase (3-HPDH), and wherein the cells are capable of producing 3-HP. In some embodiments, the 3-HPDH utilizes an NAD(H) cofactor. In some embodiments, the 3-HPDH has an increased specificity for the cofactor NAD(H) compared to NADP(H).

[0006] In some embodiments, the recombinant cells comprise an active 3-HP pathway that proceeds through a malonate semialdehyde intermediate.

[0007] In some embodiments, the heterologous polynucleotide: (a) encodes an 3-HPDH having at least 60% sequence identity to SEQ ID NO: 197, SEQ ID NO: 199, SEQ ID NO: 201, or SEQ ID NO: 203; (b) comprises a coding sequence that hybridizes under at least low stringency conditions with the full-length complementary strand of SEQ ID NO: 196, SEQ ID NO: 198, SEQ ID NO: 200, or SEQ ID NO: 202; or (c) comprises a coding sequence having at least 60% sequence identity to SEQ ID NO: 196, SEQ ID NO: 198, SEQ ID NO: 200, or SEQ ID NO: 202. As can be appreciated by one of skill in the art, in some instances the heterologous polynucleotide may qualify under more than one of the respective selections (a), (b) and (c) noted above.

[0008] In some embodiments, the recombinant cells produce a greater amount of 3-HP compared to the cells without the heterologous polynucleotide encoding the encoding a 3-hydroxypropionate dehydrogenase (3-HPDH) when cultivated under identical conditions.

[0009] In some aspects, the recombinant cells comprise one or more (e.g., two, several) heterologous polynucleotides selected from a heterologous polynucleotide encoding a PPC, a heterologous polynucleotide encoding a PYC, a heterologous polynucleotide encoding an AAT, a heterologous polynucleotide encoding an ADC, a heterologous polynucleotide encoding a BAAT or gabT, and a heterologous polynucleotide encoding a 3-HPDH. In some embodiments, the recombinant cells comprise a heterologous polynucleotide encoding an aspartate 1-decarboxylase (ADC).

[0010] In some embodiments, the recombinant cells comprise a disruption to one or more endogenous genes encoding a PDC, ADH, GALE, CYB2A, CYB2B, GPD, GPP, ALD, or PCK. In some embodiments, the recombinant cells comprise a disruption to one or both of an endogenous gene encoding a PDC and an endogenous gene encoding a GPD.

[0011] In some embodiments, the recombinant cells are bacterial or fungal cells. In some embodiments, the recombinant cells are yeast cells such as Issatchenkia, Candida, Kluyveromyces, Pichia, Schizosaccharomyces, Torulaspora, Zygosaccharomyces, or Saccharomyces yeast cells. In some embodiments, the recombinant cells are 3-HP-resistant yeast cells. In some embodiments, the recombinant cells are unable to ferment pentose sugars.

[0012] Also described are methods of producing 3-HP and related compounds. In one aspect is a method of producing 3-HP, comprising: (a) cultivating a recombinant cell described herein in a medium under suitable conditions to produce 3-HP; and (b) recovering the 3-HP. In another aspect is a method of producing acrylic acid or a salt thereof, comprising: (a) cultivating a recombinant cell described herein in a medium under suitable conditions to produce 3-HP; (b) recovering the 3-HP; (c) dehydrating the 3-HP under suitable conditions to produce acrylic acid or a salt thereof; and (d) recovering the acrylic acid or salt thereof.

### BRIEF DESCRIPTION OF THE FIGURES

[0013] FIG. 1 shows a summary of select 3-HP pathways from glucose.

[0014] FIG. 2 shows a plasmid map for pMcTs325.

[0015] FIG. 3 shows a plasmid map for pMcTs326.

[0016] FIG. 4 shows a plasmid map for pMcTs319.

[0017] FIG. 5 shows a plasmid map for pMcTs318.

### DEFINITIONS

[0018] Abbreviations: 3-HPA, 3-hydroxypropionaldehyde; 3-HPDH, 3-hydroxypropionic acid dehydrogenase; AAM, alanine 2,3-aminomutase; AAT, aspartate aminotransferase; ACC, acetyl-CoA carboxylase; ADC, aspartate 1-decarboxylase; AKG, alpha-ketoglutarate; ALD, aldehyde dehydrogenase; BAAT, β-alanine aminotransferase; BCKA, branched-chain alpha-keto acid decarboxylase; bp, base pairs; CYB2, L-(+)-lactate-cytochrome c oxidoreductase; CYC, iso-2-cytochrome c; EMS, ethane methyl sulfonase; ENO, enolase; gabT, 4-aminobutyrate aminotransferase; GAPDH, glyceraldehyde-3-phosphate dehydrogenase 3; GPD, glycerol 3-phosphate dehydrogenase; GPP, glycerol 3-phosphate phosphatase; HIBADH, 3-hydroxyisobutyrate dehydrogenase; IPDA, indolepyruvate decarboxylase; KGD, alpha-ketoglutarate decarboxylase; LDH, lactate dehydrogenase; MAE, malic enzyme; MDHB, malate dehydrogenase B; OAA, oxaloacetate; PCK, phosphoenolpyruvate carboxykinase; PDC, pyruvate decarboxylase; PDH, pyruvate dehydrogenase; PEP, phosphoenolpyruvate; PGK, phosphoglycerate kinase; PPC, phosphoenolpyruvate carboxylase; PYC, pyruvate carboxylase; RKI, ribose 5-phosphate ketol-isomerase; TAL, transaldolase; TEF1, translation elongation factor-1; TEF2, translation elongation factor-2; TKL, transketolase, XDH, xylitol dehydrogenase; XR, xylose reductase; YP, yeast extract/peptone.

[0019] Active 3-HP pathway: As used herein, a host cell having an “active 3-HP pathway” produces active enzymes necessary to catalyze each reaction of a metabolic pathway in a sufficient amount to produce 3-HP from a fermentable sugar, and therefore is capable of producing 3-HP in measurable yields when cultivated under fermentation conditions in the presence of at least one fermentable sugar. A host cell having an active 3-HP pathway comprises one or more 3-HP pathway genes. A “3-HP pathway gene” as used herein refers to a gene that encodes an enzyme involved in an active 3-HP pathway.

[0020] The active enzymes necessary to catalyze each reaction in an active 3-HP pathway may result from activities of endogenous gene expression, activities of heterologous gene expression, or from a combination of activities of endogenous and heterologous gene expression, as described in more detail herein.

[0021] Allelic variant: The term “allelic variant” means any of two or more alternative forms of a gene occupying the same chromosomal locus. Allelic variation arises naturally through mutation, and may result in polymorphism within populations. Gene mutations can be silent (no change in the encoded polypeptide) or may encode polypeptides having altered amino acid sequences. An allelic variant of a polypeptide is a polypeptide encoded by an allelic variant of a gene.

[0022] Coding sequence: The term “coding sequence” or “coding region” means a polynucleotide sequence, which specifies the amino acid sequence of a polypeptide. The boundaries of the coding sequence are generally determined by an open reading frame, which usually begins with the ATG start codon or alternative start codons such as GTG and TTG and ends with a stop codon such as TAA, TAG, and TGA. The coding sequence may be a sequence of genomic DNA, cDNA, a synthetic polynucleotide, and/or a recombinant polynucleotide.

[0023] Control sequence: The term “control sequence” means a nucleic acid sequence necessary for polypeptide expression. Control sequences may be native or foreign to the polynucleotide encoding the polypeptide, and native or foreign to each other. Such control sequences include, but are not limited to, a leader sequence, polyadenylation sequence, propeptide sequence, promoter sequence, signal peptide sequence, and transcription terminator sequence. The control sequences may be provided with linkers for the purpose of introducing specific restriction sites facilitating ligation of the control sequences with the coding region of the polynucleotide encoding a polypeptide.

[0024] Disruption: The term “disruption” means that a coding region and/or control sequence of a referenced gene is partially or entirely modified (such as by deletion, insertion, and/or substitution of one or more nucleotides) resulting in the absence (inactivation) or decrease in expression, and/or the absence or decrease of enzyme activity of the encoded polypeptide. The effects of disruption can be measured using techniques known in the art such as detecting the absence or decrease of enzyme activity using from cell-free extract measurements referenced herein; or by the absence or decrease of corresponding mRNA (e.g., at least 25% decrease, at least 50% decrease, at least 60% decrease, at least 70% decrease, at least 80% decrease, or at least 90% decrease); the absence or decrease in the amount of corresponding polypeptide having enzyme activity (e.g., at least 25% decrease, at least 50% decrease, at least 60% decrease, at least 70% decrease, at least 80% decrease, or at least 90% decrease); or the absence or decrease of the specific activity of the corresponding polypeptide having enzyme activity (e.g., at least 25% decrease, at least 50% decrease, at least 60% decrease, at least 70% decrease, at least 80% decrease, or at least 90% decrease). Disruptions of a particular gene of interest can be generated by methods known in the art, e.g., by directed homologous recombination (see Methods in Yeast Genetics (1997 edition), Adams, Gottschling, Kaiser, and Stems, Cold Spring Harbor Press (1998)).

[0025] Endogenous gene: The term “endogenous gene” means a gene that is native to the referenced host cell. “Endogenous gene expression” means expression of an endogenous gene.

[0026] Expression: The term “expression” includes any step involved in the production of the polypeptide including, but not limited to, transcription, post-transcriptional modification, translation, post-translational modification, and secretion. Expression can be measured—for example, to detect increased expression—by techniques known in the art, such as measuring levels of mRNA and/or translated polypeptide.

[0027] Expression vector: The term “expression vector” means a linear or circular DNA molecule that comprises a polynucleotide encoding a polypeptide and is operably linked to control sequences, wherein the control sequences provide for expression of the polynucleotide encoding the polypeptide. At a minimum, the expression vector comprises a promoter sequence, and transcriptional and translational stop signal sequences.

[0028] Fermentable medium: The term “fermentable medium” or “fermentation medium” refers to a medium comprising one or more (e.g., two, several) sugars, such as glucose, fructose, sucrose, cellobiose, xylose, xylulose, arabinose, mannose, galactose, and/or soluble oligosaccharides, wherein the medium is capable, in part, of being converted (fermented) by a host cell into a desired product, such as 3-HP. In some instances, the fermentation medium is derived from a natural source, such as sugar cane, starch, or cellulose, and may be the result of pretreating the source by enzymatic hydrolysis (saccharification).

[0029] Heterologous polynucleotide: The term “heterologous polynucleotide” is defined herein as a polynucleotide that is not native to the host cell; a native polynucleotide in which structural modifications have been made to the coding region; a native polynucleotide whose expression is quantitatively altered as a result of a manipulation of the DNA by recombinant DNA techniques, e.g., a different (foreign) promoter; or a native polynucleotide in a host cell having one or more extra copies of the polynucleotide to quantitatively alter expression. A “heterologous gene” is a gene comprising a heterologous polynucleotide.

[0030] High stringency conditions: The term “high stringency conditions” means for probes of at least 100 nucleotides in length, prehybridization and hybridization at 42° C. in 5×SSPE, 0.3% SDS, 200 micrograms/ml sheared and denatured salmon sperm DNA, and 50% formamide, following standard Southern blotting procedures for 12 to 24 hours. The carrier material is finally washed three times each for 15 minutes using 0.2×SSC, 0.2% SDS at 65° C.

[0031] Host cell: The term “host cell” means any cell type that is susceptible to transformation, transfection, transduction, and the like with a nucleic acid construct or expression vector. The term “host cell” encompasses any progeny of a parent cell that is not identical to the parent cell due to mutations that occur during replication. The term “recombinant cell” is defined herein as a non-naturally occurring host cell comprising one or more (e.g., two, several) heterologous polynucleotides.

[0032] 3-HP: The term “3-HP” includes salt and acid forms of “3-hydroxypropionic acid” unless stated otherwise from the context in which it is used.

[0033] 3-hydroxypropionate dehydrogenase: The term “3-hydroxypropionate dehydrogenase” (3-HPDH) means an enzyme that catalyzes the interconversion of malonate semialdehyde to 3-hydroxypropionate (3-HP) in the presence of a NAD(H) or NADP(H) cofactor. Enzymes having 3-HP dehydrogenase activity are classified as EC 1.1.1.59 if they utilize an NAD(H) cofactor, and as EC 1.1.1.298 if they utilize an NADP(H) cofactor. Enzymes classified as EC 1.1.1.298 are alternatively referred to as malonate semialdehyde reductases. One skilled in the art will recognize that 3-hydroxypropionate dehydrogenases may have specificity for more than one substrate. For example, in some instances, the 3-hydroxypropionate dehydrogenase may catalyze both the interconversion of serine to 2-aminomalonate semialdehyde (i.e. a “serine dehydrogenase”) and the interconversion of 3-HP to malonate semialdehyde (i.e., a 3-HPDH).

[0034] 3-hydroxypropionate dehydrogenase activity can be determined according to malonate semi-aldehyde reductase assay described in the Examples. In one aspect, the 3-HPDHs of the present invention have at least 20%, e.g., at least 40%, at least 50%, at least 60%, at least 70%, at least 80%, at least 90%, at least 95%, or at least 100% of the 3-hydroxypropionate dehydrogenase of SEQ ID NO: 197, SEQ ID NO: 199, SEQ ID NO: 201, or SEQ ID NO: 203.

[0035] Low stringency conditions: The term “low stringency conditions” means for probes of at least 100 nucleotides in length, prehybridization and hybridization at 42° C. in 5×SSPE, 0.3% SDS, 200 micrograms/ml sheared and denatured salmon sperm DNA, and 25% formamide, following standard Southern blotting procedures for 12 to 24 hours. The carrier material is finally washed three times each for 15 minutes using 0.2×SSC, 0.2% SDS at 50° C.

[0036] Medium stringency conditions: The term “medium stringency conditions” means for probes of at least 100 nucleotides in length, prehybridization and hybridization at 42° C. in 5×SSPE, 0.3% SDS, 200 micrograms/ml sheared and denatured salmon sperm DNA, and 35% formamide, following standard Southern blotting procedures for 12 to 24 hours. The carrier material is finally washed three times each for 15 minutes using 0.2×SSC, 0.2% SDS at 55° C.

[0037] Medium-high stringency conditions: The term “medium-high stringency conditions” means for probes of at least 100 nucleotides in length, prehybridization and hybridization at 42° C. in 5×SSPE, 0.3% SDS, 200 micrograms/ml sheared and denatured salmon sperm DNA, and 35% formamide, following standard Southern blotting procedures for 12 to 24 hours. The carrier material is finally washed three times each for 15 minutes using 0.2×SSC, 0.2% SDS at 60° C.

[0038] Nucleic acid construct: The term “nucleic acid construct” means a polynucleotide comprises one or more (e.g., two, several) control sequences. The polynucleotide may be single-stranded or double-stranded, and may be isolated from a naturally occurring gene, modified to contain segments of nucleic acids in a manner that would not otherwise exist in nature, or synthetic.

[0039] Operably linked: The term “operably linked” means a configuration in which a control sequence is placed at an appropriate position relative to the coding sequence of a polynucleotide such that the control sequence directs expression of the coding sequence.

[0040] Sequence Identity: The relatedness between two amino acid sequences or between two nucleotide sequences is described by the parameter “sequence identity”.

[0041] For purposes described herein, the degree of sequence identity between two amino acid sequences is determined using the Needleman-Wunsch algorithm (Needleman and Wunsch, J. Mol. Biol. 1970, 48, 443-453) as implemented in the Needle program of the EMBOSS package (EMBOSS: The European Molecular Biology Open Software Suite, Rice et al., Trends Genet 2000, 16, 276-277), preferably version 3.0.0 or later. The optional parameters used are gap open penalty of 10, gap extension penalty of 0.5, and the EBLOSUM62 (EMBOSS version of BLOSUM62) substitution matrix. The output of Needle labeled “longest identity” (obtained using the −nobrief option) is used as the percent identity and is calculated as follows:

(Identical Residues×100)/(Length of the Referenced Sequence−Total Number of Gaps in Alignment)

[0042] For purposes described herein, the degree of sequence identity between two deoxyribonucleotide sequences is determined using the Needleman-Wunsch algorithm (Needleman and Wunsch, 1970, supra) as implemented in the Needle program of the EMBOSS package (EMBOSS: The European Molecular Biology Open Software Suite, Rice et al., 2000, supra), preferably version 3.0.0 or later. The optional parameters used are gap open penalty of 10, gap extension penalty of 0.5, and the EDNAFULL (EMBOSS version of NCBI NUC4.4) substitution matrix. The output of Needle labeled “longest identity” (obtained using the −nobrief option) is used as the percent identity and is calculated as follows:

(Identical Deoxyribonucleotides×100)/(Length of Referenced Sequence−Total Number of Gaps in Alignment)

[0043] Very high stringency conditions: The term “very high stringency conditions” means for probes of at least 100 nucleotides in length, prehybridization and hybridization at 42° C. in 5×SSPE, 0.3% SDS, 200 micrograms/ml sheared and denatured salmon sperm DNA, and 50% formamide, following standard Southern blotting procedures for 12 to 24 hours. The carrier material is finally washed three times each for 15 minutes using 0.2×SSC, 0.2% SDS at 70° C.

[0044] Very low stringency conditions: The term “very low stringency conditions” means for probes of at least 100 nucleotides in length, prehybridization and hybridization at 42° C. in 5×SSPE, 0.3% SDS, 200 micrograms/ml sheared and denatured salmon sperm DNA, and 25% formamide, following standard Southern blotting procedures for 12 to 24 hours. The carrier material is finally washed three times each for 15 minutes using 0.2×SSC, 0.2% SDS at 45° C.

[0045] Volumetric productivity: The term “volumetric productivity” refers to the amount of referenced product produced (e.g., the amount of 3-HP produced) per volume of the system used (e.g., the total volume of media and contents therein) per unit of time.

[0046] Reference to “about” a value or parameter herein includes aspects that are directed to that value or parameter per se. For example, description referring to “about X” includes the aspect “X”. When used in combination with measured values, “about” includes a range that encompasses at least the uncertainty associated with the method of measuring the particular value, and can include a range of plus or minus two standard deviations around the stated value.

[0047] As used herein and in the appended claims, the singular forms “a,” “or,” and “the” include plural referents unless the context clearly dictates otherwise. It is understood that the aspects described herein include “consisting” and/or “consisting essentially of” aspects.

[0048] Unless defined otherwise or clearly indicated by context, all technical and scientific terms used herein have the same meaning as commonly understood by one of ordinary skill in the art.

### DETAILED DESCRIPTION

[0049] Described herein, inter alia, are recombinant cells having an active 3-HP pathway which comprises a heterologous polynucleotide encoding a encoding a 3-hydroxypropionate dehydrogenase (3-HPDH). The Applicant has surprisingly found that the polypeptides of SEQ ID NO: 197 from Candida parapsilosis, SEQ ID NO: 199 from Debaryomyces hansenii, SEQ ID NO: 201 from Meyerozyma guilliermondii, and SEQ ID NO: 203 from Clavispora lusitaniae have NAD(H) dependent 3-HPDH activity. The Applicant has further found that expression of these polypeptides in a recombinant host cells having an active 3-HP pathway proceeding through malonate semialdehyde results in high levels of fermented 3-HP.

[0050] The Applicant's finding of expressing the NAD(H)-dependent 3-HPDHs of SEQ ID NOs: 197, 199, 201, and 203 for 3-HP production may be particularly applicable to host cells that would benefit from decreased levels of NADH (e.g., cells that have disruptions to an endogenous GPD or PDC gene resulting in NADH buildup) in order to improve cellular redox balance.

[0051] Accordingly, in one aspect are recombinant cells comprising a heterologous polynucleotide encoding a 3-hydroxypropionate dehydrogenase (3-HPDH), wherein the cells capable of producing 3-HP. In some embodiments, the 3-HPDH utilizes an NAD(H) cofactor. In some embodiments, the 3-HPDH has an increased specificity for the cofactor NAD(H) compared to NADP(H) (e.g., greater than 2-fold, 5-fold, 10-fold, 20-fold, 50-fold, 100-fold, 200-fold, 500-fold, or 1000-fold specificity for NAD(H) compared to NADP(H)).

[0052] In some embodiments, the recombinant cells comprise an active 3-HP pathway that proceeds through a malonate semialdehyde intermediate. In some aspects, the cells lacks an endogenous 3-HPDH gene or have a disruption of an endogenous 3-HPDH. In one aspect, 3-HPDH is present in the cytosol of the host cells.

[0053] The 3-HPDH can be any 3-HPDH related to the sequences described herein that is suitable for the host cells and their methods of use, such as the 3-HPDHs described by specific SEQ ID numbers, or variants thereof that retain 3-HPDH activity (such as artificial variants or a natural variants from other species).

[0054] In some aspects, the 3-HPDH has at least 20%, e.g., at least 40%, at least 50%, at least 60%, at least 70%, at least 80%, at least 90%, at least 95%, at least 96%, at least 97%, at least 98%, at least 99%, or 100% of the 3-HPDH activity of SEQ ID NO: 197, SEQ ID NO: 199, SEQ ID NO: 201, or SEQ ID NO: 203 under the same conditions.

[0055] In one embodiment, the heterologous polynucleotide encodes a 3-HPDH that comprises or consists of the amino acid sequence of SEQ ID NO: 197. In another embodiment, the 3-HPDH comprises or consists of the amino acid sequence of SEQ ID NO: 199. In another embodiment, the 3-HPDH comprises or consists of the amino acid sequence of SEQ ID NO: 201. In another embodiment, the 3-HPDH comprises or consists of the amino acid sequence of SEQ ID NO: 203. In some embodiments, the 3-HPDH lacks an N-terminal mitochondrial target sequence (MTS).

[0056] In another embodiment, the heterologous polynucleotide encodes a fragment of a polypeptide of SEQ ID NO: 197, 199, 201, or 203, wherein the fragment has 3-HPDH activity. In one embodiment, the number of amino acid residues in the fragment is at least 75%, e.g., at least 80%, 85%, 90%, or 95% of the number of amino acid residues in the referenced sequence.

[0057] The 3-HPDH may also be a variant of the described 3-HPDHs. In one embodiment, the 3-HPDH has at least 60%, e.g., at least 65%, at least 70%, at least 75%, at least 80%, at least 85%, at least 90%, at least 91%, at least 92%, at least 93%, at least 94%, at least 95%, at least 96%, at least 97%, at least 98%, at least 99%, or 100% sequence identity to SEQ ID NO: 197. In one embodiment, the 3-HPDH sequence differs by no more than ten amino acids, e.g., by no more than five amino acids, by no more than four amino acids, by no more than three amino acids, by no more than two amino acids, or by one amino acid from SEQ ID NO: 197. In one embodiment, the 3-HPDH comprises or consists of the amino acid sequence of SEQ ID NO: 197, or an allelic variant, or a fragment thereof having 3-HPDH activity. In one embodiment, the 3-HPDH has an amino acid substitution, deletion, and/or insertion of one or more (e.g., two, several) amino acids of SEQ ID NO: 197. In some embodiments, the total number of amino acid substitutions, deletions and/or insertions is not more than 10, e.g., not more than 9, 8, 7, 6, 5, 4, 3, 2, or 1.

[0058] In one embodiment, the 3-HPDH has at least 60%, e.g., at least 65%, at least 70%, at least 75%, at least 80%, at least 85%, at least 90%, at least 91%, at least 92%, at least 93%, at least 94%, at least 95%, at least 96%, at least 97%, at least 98%, at least 99%, or 100% sequence identity to SEQ ID NO: 199. In one embodiment, the 3-HPDH sequence differs by no more than ten amino acids, e.g., by no more than five amino acids, by no more than four amino acids, by no more than three amino acids, by no more than two amino acids, or by one amino acid from SEQ ID NO: 199. In one embodiment, the 3-HPDH comprises or consists of the amino acid sequence of SEQ ID NO: 199, or an allelic variant, or a fragment thereof having 3-HPDH activity. In one embodiment, the 3-HPDH has an amino acid substitution, deletion, and/or insertion of one or more (e.g., two, several) amino acids of SEQ ID NO: 199. In some embodiments, the total number of amino acid substitutions, deletions and/or insertions is not more than 10, e.g., not more than 9, 8, 7, 6, 5, 4, 3, 2, or 1.

[0059] In one embodiment, the 3-HPDH has at least 60%, e.g., at least 65%, at least 70%, at least 75%, at least 80%, at least 85%, at least 90%, at least 91%, at least 92%, at least 93%, at least 94%, at least 95%, at least 96%, at least 97%, at least 98%, at least 99%, or 100% sequence identity to SEQ ID NO: 201. In one embodiment, the 3-HPDH sequence differs by no more than ten amino acids, e.g., by no more than five amino acids, by no more than four amino acids, by no more than three amino acids, by no more than two amino acids, or by one amino acid from SEQ ID NO: 201. In one embodiment, the 3-HPDH comprises or consists of the amino acid sequence of SEQ ID NO: 201, or an allelic variant, or a fragment thereof having 3-HPDH activity. In one embodiment, the 3-HPDH has an amino acid substitution, deletion, and/or insertion of one or more (e.g., two, several) amino acids of SEQ ID NO: 201. In some embodiments, the total number of amino acid substitutions, deletions and/or insertions is not more than 10, e.g., not more than 9, 8, 7, 6, 5, 4, 3, 2, or 1.

[0060] In one embodiment, the 3-HPDH has at least 60%, e.g., at least 65%, at least 70%, at least 75%, at least 80%, at least 85%, at least 90%, at least 91%, at least 92%, at least 93%, at least 94%, at least 95%, at least 96%, at least 97%, at least 98%, at least 99%, or 100% sequence identity to SEQ ID NO: 203. In one embodiment, the 3-HPDH sequence differs by no more than ten amino acids, e.g., by no more than five amino acids, by no more than four amino acids, by no more than three amino acids, by no more than two amino acids, or by one amino acid from SEQ ID NO: 203. In one embodiment, the 3-HPDH comprises or consists of the amino acid sequence of SEQ ID NO: 203, or an allelic variant, or a fragment thereof having 3-HPDH activity. In one embodiment, the 3-HPDH has an amino acid substitution, deletion, and/or insertion of one or more (e.g., two, several) amino acids of SEQ ID NO: 203. In some embodiments, the total number of amino acid substitutions, deletions and/or insertions is not more than 10, e.g., not more than 9, 8, 7, 6, 5, 4, 3, 2, or 1.

[0061] The amino acid changes are generally of a minor nature, that is conservative amino acid substitutions or insertions that do not significantly affect the folding and/or activity of the protein; small deletions, typically of one to about 30 amino acids; small amino-terminal or carboxyl-terminal extensions, such as an amino-terminal methionine residue; a small linker peptide of up to about 20-25 residues; or a small extension that facilitates purification by changing net charge or another function, such as a poly-histidine tract, an antigenic epitope or a binding domain.

[0062] Examples of conservative substitutions are within the group of basic amino acids (arginine, lysine and histidine), acidic amino acids (glutamic acid and aspartic acid), polar amino acids (glutamine and asparagine), hydrophobic amino acids (leucine, isoleucine and valine), aromatic amino acids (phenylalanine, tryptophan and tyrosine), and small amino acids (glycine, alanine, serine, threonine and methionine). Amino acid substitutions that do not generally alter specific activity are known in the art and are described, for example, by H. Neurath and R. L. Hill, 1979, In, The Proteins, Academic Press, New York. The most commonly occurring exchanges are Ala/Ser, Val/Ile, Asp/Glu, Thr/Ser, Ala/Gly, Ala/Thr, Ser/Asn, Ala/Val, Ser/Gly, Tyr/Phe, Ala/Pro, Lys/Arg, Asp/Asn, Leu/Ile, Leu/Val, Ala/Glu, and Asp/Gly.

[0063] Alternatively, the amino acid changes are of such a nature that the physico-chemical properties of the polypeptides are altered. For example, amino acid changes may improve the thermal stability of the 3-HPDH, alter the substrate specificity, change the pH optimum, and the like.

[0064] Essential amino acids can be identified according to procedures known in the art, such as site-directed mutagenesis or alanine-scanning mutagenesis (Cunningham and Wells, 1989, Science 244: 1081-1085). In the latter technique, single alanine mutations are introduced at every residue in the molecule, and the resultant mutant molecules are tested for 3-HPDH activity to identify amino acid residues that are critical to the activity of the molecule. See also, Hilton et al., 1996, J. Biol. Chem. 271: 4699-4708. The active site of the 3-HPDH or other biological interaction can also be determined by physical analysis of structure, as determined by such techniques as nuclear magnetic resonance, crystallography, electron diffraction, or photoaffinity labeling, in conjunction with mutation of putative contact site amino acids. See, for example, de Vos et al., 1992, Science 255: 306-312; Smith et al., 1992, J. Mol. Biol. 224: 899-904; Wlodaver et al., 1992, FEBS Lett. 309: 59-64. The identities of essential amino acids can also be inferred from analysis of identities with other 3-HPDHs that are related to the referenced 3-HPDH.

[0065] Additional guidance on the structure-activity relationship of the 3-HPDHs herein can be determined using multiple sequence alignment (MSA) techniques well-known in the art. Based on the teachings herein, the skilled artisan could make similar alignments with any number of 3-HPDHs described herein or known in the art. Such alignments aid the skilled artisan to determine potentially relevant domains (e.g., binding domains or catalytic domains), as well as which amino acid residues are conserved and not conserved among the different 3-HPDH sequences. It is appreciated in the art that changing an amino acid that is conserved at a particular position between the disclosed 3-HPDHs will more likely result in a change in biological activity (Bowie et al., 1990, Science 247: 1306-1310: “Residues that are directly involved in protein functions such as binding or catalysis will certainly be among the most conserved”). In contrast, substituting an amino acid that is not highly conserved among the 3-HPDHs will not likely or significantly alter the biological activity.

[0066] Single or multiple amino acid substitutions, deletions, and/or insertions can be made and tested using known methods of mutagenesis, recombination, and/or shuffling, followed by a relevant screening procedure, such as those disclosed by Reidhaar-Olson and Sauer, 1988, Science 241: 53-57; Bowie and Sauer, 1989, Proc. Natl. Acad. Sci. USA 86: 2152-2156; WO 95/17413; or WO 95/22625. Other methods that can be used include error-prone PCR, phage display (e.g., Lowman et al., 1991, Biochemistry 30: 10832-10837; U.S. Pat. No. 5,223,409; WO 92/06204), and region-directed mutagenesis (Derbyshire et al., 1986, Gene 46: 145; Ner et al., 1988, DNA 7: 127).

[0067] Mutagenesis/shuffling methods can be combined with high-throughput, automated screening methods to detect activity of cloned, mutagenized polypeptides expressed by host cells (Ness et al., 1999, Nature Biotechnology 17: 893-896). Mutagenized DNA molecules that encode active 3-HPDHs can be recovered from the host cells and rapidly sequenced using standard methods in the art. These methods allow the rapid determination of the importance of individual amino acid residues in a polypeptide.

[0068] In another embodiment, the heterologous polynucleotide encoding the 3-HPDH comprises a coding sequence having at least 60%, e.g., at least 65%, at least 70%, at least 75%, at least 80%, at least 85%, at least 90%, at least 95%, at least 96%, at least 97%, at least 98%, at least 99%, or 100% sequence identity to SEQ ID NO: 196. In another embodiment, the coding sequence has at least 60%, e.g., at least 65%, at least 70%, at least 75%, at least 80%, at least 85%, at least 90%, at least 95%, at least 96%, at least 97%, at least 98%, at least 99%, or 100% sequence identity to SEQ ID NO: 198. In another embodiment, the coding sequence has at least 60%, e.g., at least 65%, at least 70%, at least 75%, at least 80%, at least 85%, at least 90%, at least 95%, at least 96%, at least 97%, at least 98%, at least 99%, or 100% sequence identity to SEQ ID NO: 200. In another embodiment, the coding sequence has at least 60%, e.g., at least 65%, at least 70%, at least 75%, at least 80%, at least 85%, at least 90%, at least 95%, at least 96%, at least 97%, at least 98%, at least 99%, or 100% sequence identity to SEQ ID NO: 202.

[0069] In one embodiment, the heterologous polynucleotide encoding the 3-HPDH comprises the coding sequence of SEQ ID NO: 196, SEQ ID NO: 198, SEQ ID NO: 200, or SEQ ID NO: 202. In another embodiment, the heterologous polynucleotide encoding the 3-HPDH comprises a subsequence of the coding sequence of SEQ ID NO: 196, SEQ ID NO: 198, SEQ ID NO: 200, or SEQ ID NO: 202, wherein the subsequence encodes a polypeptide having 3-HPDH activity. In another embodiment, the number of nucleotides residues in the coding subsequence is at least 75%, e.g., at least 80%, 85%, 90%, or 95% of the number of the referenced coding sequence.

[0070] The referenced coding sequence of any related aspect or embodiment described herein can be the native coding sequence or a degenerate sequence, such as a codon-optimized coding sequence designed for a particular host cell.

[0071] The polynucleotide coding sequence of SEQ ID NO: 196, 198, 200, or 202, or a subsequence thereof, as well as the polypeptide of SEQ ID NO: 197, 199, 201, or 203, or a fragment thereof, may be used to design nucleic acid probes to identify and clone DNA encoding a parent from strains of different genera or species according to methods well known in the art. In particular, such probes can be used for hybridization with the genomic DNA or cDNA of a cell of interest, following standard Southern blotting procedures, in order to identify and isolate the corresponding gene therein. Such probes can be considerably shorter than the entire sequence, but should be at least 15, e.g., at least 25, at least 35, or at least 70 nucleotides in length. Preferably, the nucleic acid probe is at least 100 nucleotides in length, e.g., at least 200 nucleotides, at least 300 nucleotides, at least 400 nucleotides, at least 500 nucleotides, at least 600 nucleotides, at least 700 nucleotides, at least 800 nucleotides, or at least 900 nucleotides in length. Both DNA and RNA probes can be used. The probes are typically labeled for detecting the corresponding gene (for example, with ³²P, ³H, ³⁵S, biotin, or avidin).

[0072] A genomic DNA or cDNA library prepared from such other strains may be screened for DNA that hybridizes with the probes described above and encodes a parent. Genomic or other DNA from such other strains may be separated by agarose or polyacrylamide gel electrophoresis, or other separation techniques. DNA from the libraries or the separated DNA may be transferred to and immobilized on nitrocellulose or other suitable carrier material. In order to identify a clone or DNA that hybridizes with SEQ ID NO: 196, SEQ ID NO: 198, SEQ ID NO: 200, or SEQ ID NO: 202, or a subsequence thereof, the carrier material is used in a Southern blot.

[0073] In one aspect, the nucleic acid probe is a polynucleotide comprising SEQ ID NO: 196, SEQ ID NO: 198, SEQ ID NO: 200, or SEQ ID NO: 202; or a subsequence thereof. In another aspect, the nucleic acid probe is a polynucleotide that encodes the polypeptide of SEQ ID NO: 197, SEQ ID NO: 199, SEQ ID NO: 201, or SEQ ID NO: 203; or a fragment thereof.

[0074] For purposes of the probes described above, hybridization indicates that the polynucleotide hybridizes to a labeled nucleic acid probe, or the full-length complementary strand thereof, or a subsequence of the foregoing; under very low to very high stringency conditions. Molecules to which the nucleic acid probe hybridizes under these conditions can be detected using, for example, X-ray film. Stringency and washing conditions are defined as described supra.

[0075] In one embodiment, the 3-HPDH is encoded by a polynucleotide that hybridizes under at least low stringency conditions, e.g., medium stringency conditions, medium-high stringency conditions, high stringency conditions, or very high stringency conditions with the full-length complementary strand of SEQ ID NO: 196. (Sambrook et al., 1989, Molecular Cloning, A Laboratory Manual, 2d edition, Cold Spring Harbor, N.Y.). In another aspect, the 3-HPDH is encoded by a polynucleotide that hybridizes under at least low stringency conditions, e.g., medium stringency conditions, medium-high stringency conditions, high stringency conditions, or very high stringency conditions with the full-length complementary strand of SEQ ID NO: 198. In another aspect, the 3-HPDH is encoded by a polynucleotide that hybridizes under at least low stringency conditions, e.g., medium stringency conditions, medium-high stringency conditions, high stringency conditions, or very high stringency conditions with the full-length complementary strand of SEQ ID NO: 200. In another aspect, the 3-HPDH is encoded by a polynucleotide that hybridizes under at least low stringency conditions, e.g., medium stringency conditions, medium-high stringency conditions, high stringency conditions, or very high stringency conditions with the full-length complementary strand of SEQ ID NO: 202.

[0076] The 3-HPDHs may be obtained from microorganisms of any suitable genus, including those readily available within the UniProtKB database (www.uniprot.org).

[0077] The 3-HPDH may be a bacterial 3-HPDH. For example, the 3-HPDH may be a Gram-positive bacterial polypeptide such as a Bacillus, Clostridium, Enterococcus, Geobacillus, Lactobacillus, Lactococcus, Oceanobacillus, Staphylococcus, Streptococcus, or Streptomyces 3-HPDH, or a Gram-negative bacterial polypeptide such as a Campylobacter, E. coli, Flavobacterium, Fusobacterium, Helicobacter, Ilyobacter, Neisseria, Pseudomonas, Salmonella, or Ureaplasma 3-HPDH.

[0078] In one embodiment, the 3-HPDH is a Bacillus alkalophilus, Bacillus amyloliquefaciens, Bacillus brevis, Bacillus circulans, Bacillus clausii, Bacillus coagulans, Bacillus firmus, Bacillus lautus, Bacillus lentus, Bacillus licheniformis, Bacillus megaterium, Bacillus pumilus, Bacillus stearothermophilus, Bacillus subtilis, or Bacillus thuringiensis 3-HPDH.

[0079] In another embodiment, the 3-HPDH is a Streptococcus equisimilis, Streptococcus pyogenes, Streptococcus uberis, or Streptococcus equi subsp. Zooepidemicus 3-HPDH.

[0080] In another embodiment, the 3-HPDH is a Streptomyces achromogenes, Streptomyces avermitilis, Streptomyces coelicolor, Streptomyces griseus, or Streptomyces lividans 3-HPDH.

[0081] The 3-HPDH may be a fungal 3-HPDH. For example, the 3-HPDH may be a yeast 3-HPDH such as a Candida, Kluyveromyces, Pichia, Saccharomyces, Schizosaccharomyces, Yarrowia or Issatchenkia 3-HPDH; or a filamentous fungal 3-HPDH such as an Acremonium, Agaricus, Alternaria, Aspergillus, Aureobasidium, Botryosphaeria, Ceriporiopsis, Chaetomidium, Chrysosporium, Claviceps, Cochliobolus, Coprinopsis, Coptotermes, Corynascus, Cryphonectria, Cryptococcus, Diplodia, Exidia, Filibasidium, Fusarium, Gibberella, Holomastigotoides, Humicola, Irpex, Lentinula, Leptospaeria, Magnaporthe, Melanocarpus, Meripilus, Mucor, Myceliophthora, Neocallimastix, Neurospora, Paecilomyces, Penicillium, Phanerochaete, Piromyces, Poitrasia, Pseudoplectania, Pseudotrichonympha, Rhizomucor, Schizophyllum, Scytalidium, Talaromyces, Thermoascus, Thielavia, Tolypocladium, Trichoderma, Trichophaea, Verticillium, Volvariella, or Xylaria 3-HPDH.

[0082] In another embodiment, the 3-HPDH is a Saccharomyces carlsbergensis, Saccharomyces cerevisiae, Saccharomyces diastaticus, Saccharomyces douglasii, Saccharomyces kluyveri, Saccharomyces norbensis, or Saccharomyces oviformis 3-HPDH.

[0083] In another embodiment, the 3-HPDH is an Acremonium cellulolyticus, Aspergillus aculeatus, Aspergillus awamori, Aspergillus foetidus, Aspergillus fumigatus, Aspergillus japonicus, Aspergillus nidulans, Aspergillus niger, Aspergillus oryzae, Chrysosporium inops, Chrysosporium keratinophilum, Chrysosporium lucknowense, Chrysosporium merdarium, Chrysosporium pannicola, Chrysosporium queenslandicum, Chrysosporium tropicum, Chrysosporium zonatum, Fusarium bactridioides, Fusarium cerealis, Fusarium crookwellense, Fusarium culmorum, Fusarium graminearum, Fusarium graminum, Fusarium heterosporum, Fusarium negundi, Fusarium oxysporum, Fusarium reticulatum, Fusarium roseum, Fusarium sambucinum, Fusarium sarcochroum, Fusarium sporotrichioides, Fusarium sulphureum, Fusarium torulosum, Fusarium trichothecioides, Fusarium venenatum, Humicola grisea, Humicola insolens, Humicola lanuginosa, Irpex lacteus, Mucor miehei, Myceliophthora thermophila, Neurospora crassa, Penicillium funiculosum, Penicillium purpurogenum, Phanerochaete chrysosporium, Thielavia achromatica, Thielavia albomyces, Thielavia albopilosa, Thielavia australeinsis, Thielavia fimeti, Thielavia microspora, Thielavia ovispora, Thielavia peruviana, Thielavia setosa, Thielavia spededonium, Thielavia subthermophila, Thielavia terrestris, Trichoderma harzianum, Trichoderma koningii, Trichoderma longibrachiatum, Trichoderma reesei, or Trichoderma viride 3-HPDH.

[0084] In another aspect, the 3-HPDH is from Debaryomyces, such as the Debaryomyces hansenii 3-HPDH of SEQ ID NO: 199. In one aspect, the 3-HPDH is from Candida, such as the Candida parapsilosis 3-HPDH of SEQ ID NO: 197. In another aspect, the 3-HPDH is from Meyerozyma, such as the Meyerozyma guilliermondii 3-HPDH of SEQ ID NO: 201. In another aspect, the 3-HPDH is from Clavispora, such as the Clavispora lusitaniae 3-HPDH of SEQ ID NO: 203.

[0085] It will be understood that for the aforementioned species, the invention encompasses both the perfect and imperfect states, and other taxonomic equivalents, e.g., anamorphs, regardless of the species name by which they are known. Those skilled in the art will readily recognize the identity of appropriate equivalents.

[0086] Strains of these species are readily accessible to the public in a number of culture collections, such as the American Type Culture Collection (ATCC), Deutsche Sammlung von Mikroorganismen und Zellkulturen GmbH (DSMZ), Centraalbureau Voor Schimmelcultures (CBS), and Agricultural Research Service Patent Culture Collection, Northern Regional Research Center (NRRL).

[0087] Strains of these species are readily accessible to the public in a number of culture collections, such as the American Type Culture Collection (ATCC), Deutsche Sammlung von Mikroorganismen und Zellkulturen GmbH (DSM), Centraalbureau Voor Schimmelcultures (CBS), and Agricultural Research Service Patent Culture Collection, Northern Regional Research Center (NRRL).

[0088] The 3-HPDHs may also be identified and obtained from other sources including microorganisms isolated from nature (e.g., soil, composts, water, silage, etc.) or DNA samples obtained directly from natural materials (e.g., soil, composts, water, silage, etc.) using the above-mentioned probes. Techniques for isolating microorganisms and DNA directly from natural habitats are well known in the art. The polynucleotide encoding a 3-HPDH may then be derived by similarly screening a genomic or cDNA library of another microorganism or mixed DNA sample.

[0089] Once a polynucleotide encoding a 3-HPDH has been detected with a suitable probe as described herein, the sequence may be isolated or cloned by utilizing techniques that are known to those of ordinary skill in the art (see, e.g., Sambrook et al., 1989, supra). Techniques used to isolate or clone polynucleotides encoding 3-HPDHs include isolation from genomic DNA, preparation from cDNA, or a combination thereof. The cloning of the polynucleotides from such genomic DNA can be effected, e.g., by using the well-known polymerase chain reaction (PCR) or antibody screening of expression libraries to detect cloned DNA fragments with shares structural features. See, e.g., Innis et al., 1990, PCR: A Guide to Methods and Application, Academic Press, New York. Other nucleic acid amplification procedures such as ligase chain reaction (LCR), ligated activated transcription (LAT) and nucleotide sequence-based amplification (NASBA) may be used.

[0090] The 3-HPDH may be a fused polypeptide or cleavable fusion polypeptide in which another polypeptide is fused at the N-terminus or the C-terminus of the 3-HPDH. A fused polypeptide may be produced by fusing a polynucleotide encoding another polypeptide to a polynucleotide encoding the 3-HPDH. Techniques for producing fusion polypeptides are known in the art, and include ligating the coding sequences encoding the polypeptides so that they are in frame and that expression of the fused polypeptide is under control of the same promoter(s) and terminator. Fusion proteins may also be constructed using intein technology in which fusions are created post-translationally (Cooper et al., 1993, EMBO J. 12: 2575-2583; Dawson et al., 1994, Science 266: 776-779).

### Active 3-HP Pathway

[0091] Any suitable 3-HP pathway can be used with the recombinant cell having a heterologous 3-HPDH to produce 3-HP. 3-HP pathways, 3-HP pathway genes and corresponding engineered transformants for fermentation of 3-HP are known in the art (e.g., US Publication No. 2012/0135481; U.S. Pat. No. 6,852,517; U.S. Pat. No. 7,309,597; US Pub. No. 2001/0021978; US Pub. No. 2008/0199926; WO02/42418; and WO10/031083; the content of which is hereby incorporated in its entirety). An overview of several known 3-HP pathways is shown in FIG. 1.

[0092] In certain embodiments, the recombinant cells provided herein have an active 3-HP pathway that proceeds through a malonate semialdehyde intermediate. Several 3-HP pathways are known in the art to proceed through a malonate semialdehyde intermediate. For example, the cells may have an active 3-HP pathway that proceeds through PEP or pyruvate, OAA, aspartate, β-alanine, and malonate semialdehyde intermediates (see, e.g., U.S. Pat. No. 7,186,541; FIG. 55). In these embodiments, the recombinant cells comprise a set of 3-HP pathway genes comprising one or more of pyruvate carboxylase (PYC), PEP carboxylase (PPC), aspartate aminotransferase (AAT), aspartate 1-decarboxylase (ADC), β-alanine aminotransferase (BAAT), aminobutyrate aminotransferase (gabT), 3-HP dehydrogenase (3-HPDH), 3-hydroxyisobutyrate dehydrogenase (HIBADH), and 4-hydroxybutyrate dehydrogenase genes. The 3-HP pathway genes may also include a PEP carboxykinase (PCK) gene that has been modified to produce a polypeptide that preferably catalyzes the conversion of PEP to OAA (native PCK genes generally produce a polypeptide that preferably catalyzes the reverse reaction of OAA to PEP).

[0093] In another example, the recombinant cells may have an active 3-HP pathway that proceeds through PEP or pyruvate, OAA, and malonate semialdehyde intermediates (see, e.g., US Pub. No. 2010/0021978, FIG. 1). In these embodiments, the cells comprise a set of 3-HP pathway genes comprising one or more of PPC, PYC, 2-keto acid decarboxylase, alpha-ketoglutarate (AKG) decarboxylase (KG D), branched-chain alpha-keto acid decarboxylase (BCKA), indolepyruvate decarboxylase (IPDA), 3-HPDH, HIBADH, and 4-hydroxybutyrate dehydrogenase genes. The 3-HP pathway genes may also include a PCK gene that has been modified to produce a polypeptide that preferably catalyzes the conversion of PEP to OAA. Further, the 3-HP pathway genes may include a PDC gene and/or benzoylformate decarboxylase gene that has been modified to encode a polypeptide capable of catalyzing the conversion of OAA to malonate semialdehyde.

[0094] In another example, the recombinant cells may have an active 3-HP pathway that proceeds through PEP or pyruvate, OAA, malonyl-CoA, and malonate semialdehyde intermediates, wherein the malonate semialdehyde intermediate is optional (see, e.g., US Pub. No. 2010/0021978, FIG. 2). In these embodiments, the cells comprise a set of 3-HP pathway genes comprising one or more of PPC, PYC, OAA formatelyase, malonyl-CoA reductase, CoA acylating malonate semialdehyde dehydrogenase, 3-HPDH, HIBADH, and 4-hydroxybutyrate dehydrogenase genes. The 3-HP pathway genes may also include a PCK gene that has been modified to produce a polypeptide that preferably catalyzes the conversion of PEP to OAA. Further, the 3-HP pathway genes may include an OAA dehydrogenase gene derived by modifying a 2-keto-acid dehydrogenase gene to produce a polypeptide that catalyzes the conversion of OAA to malonyl-CoA.

[0095] In another example, the recombinant cells may have an active 3-HP pathway that proceeds through pyruvate, acetyl-CoA, malonyl-CoA, and malonate semialdehyde intermediates, wherein the malonate semialdehyde intermediate is optional (see, e.g., U.S. Pat. No. 7,186,541; FIG. 44). In these embodiments, the cells comprise a set of 3-HP pathway genes comprising one or more of pyruvate dehydrogenase (PDH), acetyl-CoA carboxylase (ACC), malonyl-CoA reductase, CoA acylating malonate semialdehyde dehydrogenase, 3-HPDH, HIBADH, and 4-hydroxybutyrate dehydrogenase genes.

[0096] In another example, the recombinant cells may have an active 3-HP pathway that proceeds through pyruvate, alanine, β-alanine, β-alanyl-CoA, acrylyl-CoA, 3-HP-CoA, and malonate semialdehyde intermediates, wherein the β-alanyl-CoA, acrylyl-CoA, 3-HP-CoA, and malonate semialdehyde intermediates are optional (β-alanine can be converted to 3-HP via a malonate semialdehyde intermediate or via β-alanyl-CoA, acrylyl-CoA, and 3-HP-CoA intermediates (see, e.g., U.S. Pat. No. 7,309,597, FIG. 1). In these embodiments, the cells comprise a set of 3-HP pathway genes comprising one or more of alanine dehydrogenase, pyruvate/alanine aminotransferase, alanine 2,3 aminomutase, CoA transferase, CoA synthetase, β-alanyl-CoA ammonia lyase, 3-HP-CoA dehydratase, 3-HP-CoA hydrolase, 3-hydroxyisobutyryl-CoA hydrolase, BAAT, 3-HPDH, HIBADH, and 4-hydroxybutyrate dehydrogenase genes.

[0097] Other pathways that do not utilize a malonate semialdehyde intermediate are also known in the art. For example, the recombinant cells may have an active 3-HP pathway that proceeds through PEP or pyruvate, OAA, and malate intermediates (see, e.g., US Pub. No. 2010/0021978; FIG. 4). In these embodiments, the cells comprise a set of 3-HP pathway genes comprising one or more of PPC, PYC, malate dehydrogenase, and malate decarboxylase genes. The 3-HP pathway genes may also include a PCK gene that has been modified to produce a polypeptide that preferably catalyzes the conversion of PEP to OAA.

[0098] In another example, the recombinant cells may have an active 3-HP pathway that proceeds through pyruvate, lactate, lactyl-CoA, acrylyl-CoA, and 3-HP-CoA intermediates (see, e.g., WO02/042418, FIG. 1). In these embodiments, the cells comprise a set of 3-HP pathway genes comprising one or more of LDH, CoA transferase, CoA synthetase, lactyl-CoA dehydratase, 3-HP-CoA dehydratase, 3-HP-CoA hydrolase, and 3-hydroxyisobutyryl-CoA hydrolase genes.

[0099] In another example, the recombinant cells may have an active 3-HP pathway that proceeds through glycerol and 3-HPA intermediates (see, e.g., U.S. Pat. No. 6,852,517). In these embodiments, the cells comprise a set of 3-HP pathway genes comprising one or more of glycerol dehydratase and aldehyde dehydrogenase genes.

[0100] In another example, the recombinant cells may have an active 3-HP pathway that proceeds through PEP or pyruvate, OAA, aspartate, β-alanine, β-alanyl-CoA, acrylyl-CoA, 3-HP-CoA, and alanine intermediates, wherein the OAA, aspartate, and alanine intermediates are optional (PEP or pyruvate can be converted to β-alanine via OAA and aspartate or via alanine) (see WO02/042418, FIG. 54; U.S. Pat. No. 7,309,597, FIG. 1). In these embodiments, the cells comprise a set of 3-HP pathway genes comprising one or more of PPC, PYC, AAT, ADC, CoA transferase, CoA synthetase, β-alanyl-CoA ammonia lyase, 3-HP-CoA dehydratase, 3-HP-CoA hydrolase, 3-hydroxyisobutyrl-CoA hydrolase, alanine dehydrogenase, pyruvate/alanine aminotransferase, and AAM genes. The 3-HP pathway genes may also include a PCK gene that has been modified to produce a polypeptide that preferably catalyzes the conversion of PEP to OAA.

[0101] In certain embodiments, the recombinant cells provided herein express one or more 3-HP pathway genes encoding enzymes selected from the group consisting of ACC (catalyzes the conversion of acetyl-CoA to malonyl-CoA), alanine 2,3 aminomutase (AAM, catalyzes the conversion of alanine to β-alanine), alanine dehydrogenase (catalyzes the conversion of pyruvate to alanine), aldehyde dehydrogenase (catalyzes the conversion of 3-HPA to 3-HP), KGD (catalyzes the conversion of OAA to malonate semialdehyde), AAT (catalyzes the conversion of OAA to aspartate), ADC (catalyzes the conversion of aspartate to β-alanine), BCKA (catalyzes the conversion of OAA to malonate semialdehyde), BAAT (catalyzes the conversion of β-alanine to malonate semialdehyde), 4-aminobutyrate aminotransferase (gabT, catalyzes the conversion of β-alanine to malonate semialdehyde), β-alanyl-CoA ammonia lyase (catalyzes the conversion of β-alanyl-CoA to acrylyl-CoA), Co-A acylating malonate semialdehyde dehydrogenase (catalyzes the conversion of malonyl-CoA to malonate semialdehyde), CoA synthetase (catalyzes the conversion of β-alanine to β-alanyl-CoA or the conversion of lactate to lactyl-CoA), CoA transferase (catalyzes the conversion of β-alanine to β-alanyl-CoA and/or the conversion of lactate to lactyl-CoA), glycerol dehydratase (catalyzes the conversion of glycerol to 3-HPA), IPDA (catalyzes the conversion of OAA to malonate semialdehyde), LDH (catalyzes the conversion of pyruvate to lactate), lactyl-CoA dehydratase (catalyzes the conversion of lactyl-CoA to acrylyl-CoA), malate decarboxylase (catalyzes the conversion of malate to 3-HP), malate dehydrogenase (catalyzes the conversion of OAA to malate), malonyl-CoA reductase (catalyzes the conversion of malonyl-CoA to malonate semialdehyde or 3-HP), OAA formatelyase (also known as pyruvate-formate lyase and ketoacid formate-lyase, catalyzes the conversion of OAA to malonyl-CoA), OAA dehydrogenase (catalyzes the conversion of OAA to malonyl CoA); PPC (catalyzes the conversion of PEP to OAA), pyruvate/alanine aminotransferase (catalyzes the conversion of pyruvate to alanine), PYC (catalyzes the conversion of pyruvate to OAA), PDH (catalyzes the conversion of pyruvate to acetyl-CoA), 2-keto acid decarboxylase (catalyzes the conversion of OAA to malonate semialdehyde), 3-HP-CoA dehydratase (also known as acrylyl-CoA hydratase, catalyzes the conversion of acrylyl-CoA to 3-HP-CoA), 3-HPDH (catalyzes the conversion of malonate semialdehyde to 3-HP), 3-HP-CoA hydrolase (catalyzes the conversion of 3-HP-CoA to 3-HP), HIBADH (catalyzes the conversion of malonate semialdehyde to 3-HP), 3-hydroxyisobutyryl-CoA hydrolase (catalyzes the conversion of 3-HP-CoA to 3-HP), and 4-hydroxybutyrate dehydrogenase (catalyzes the conversion of malonate semialdehyde to 3-HP). For each of these enzyme activities, the reaction of interest in parentheses may be a result of endogenous or heterologous activity.

[0102] Any suitable 3-HP pathway gene, endogenous or heterologous, may be used and expressed in sufficient amount to produce an enzyme involved in a selected active 3-HP pathway. With the complete genome sequence available for now more than 550 species (with more than half of these available on public databases such as the NCBI), including 395 microorganism genomes and a variety of yeast, fungi, plant, and mammalian genomes, the identification of genes encoding the selected 3-HP pathway enzymatic activities taught herein is routine and well known in the art for a selected host. For example, suitable homologues, orthologs, paralogs and nonorthologous gene displacements of known genes, and the interchange of genetic alterations between organisms can be identified in related or distant host to a selected host.

[0103] For recombinant cells without a known genome sequence, sequences for genes of interest (either as overexpression candidates or as insertion sites) can typically be obtained using techniques known in the art. Routine experimental design can be employed to test expression of various genes and activity of various enzymes, including genes and enzymes that function in a 3-HP pathway. Experiments may be conducted wherein each enzyme is expressed in the cell individually and in blocks of enzymes up to and including preferably all pathway enzymes, to establish which are needed (or desired) for improved 3-HP production. One illustrative experimental design tests expression of each individual enzyme as well as of each unique pair of enzymes, and further can test expression of all required enzymes, or each unique combination of enzymes. A number of approaches can be taken, as will be appreciated.

[0104] The recombinant host cells of the invention can be produced by introducing heterologous polynucleotides encoding one or more of the enzymes participating in a 3-HP pathway, as described below. As one in the art will appreciate, in some instances (e.g., depending on the selection of host) the heterologous expression of every gene shown in the 3-HP pathway may not be required for 3-HP production since a host cell may have endogenous enzymatic activity from one or more pathway genes. For example, if a chosen host is deficient in one or more enzymes of a 3-HP pathway, then heterologous polynucleotides for the deficient enzyme(s) are introduced into the host for subsequent expression. Alternatively, if the chosen host exhibits endogenous expression of some pathway genes, but is deficient in others, then an encoding polynucleotide is needed for the deficient enzyme(s) to achieve 3-HP biosynthesis. Thus, a recombinant host cell of the invention can be produced by introducing heterologous polynucleotides to obtain the enzyme activities of a desired biosynthetic pathway or a desired biosynthetic pathway can be obtained by introducing one or more heterologous polynucleotides that, together with one or more endogenous enzymes, produces a desired product such as 3-HP.

[0105] Depending on the 3-HP pathway constituents of a selected recombinant host organism, the host cells of the invention will include at least one heterologous polynucleotide encoding a 3-HPDH and optionally up to all encoding heterologous polynucleotides for the 3-HP pathway. For example, 3-HP biosynthesis can be established in a host deficient in a 3-HP pathway enzyme through heterologous expression of the corresponding polynucleotide. In a host deficient in all enzymes of a 3-HP pathway, heterologous expression of all enzymes in the pathway can be included, although it is understood that all enzymes of a pathway can be expressed even if the host contains at least one of the pathway enzymes.

[0106] A “pyruvate carboxylase gene” or “PYC gene” as used herein refers to any gene that encodes a polypeptide with pyruvate carboxylase activity, meaning the ability to catalyze the conversion of pyruvate, CO₂, and ATP to OAA, ADP, and phosphate. In certain embodiments, a PYC gene may be derived from a yeast source. For example, the PYC gene may be derived from an I. orientalis PYC gene encoding the amino acid sequence set forth in SEQ ID NO: 2. In other embodiments, the gene may encode an amino acid sequence with at least 50%, at least 60%, at least 70%, at least 80%, at least 85%, at least 90%, at least 95%, at least 97%, or at least 99% sequence identity to the amino acid sequence of SEQ ID NO: 2. In certain embodiments, an I. orientalis-derived PYC gene may comprise the nucleotide sequence set forth in SEQ ID NO: 1 or a nucleotide sequence with at least 50%, at least 60%, at least 70%, at least 80%, at least 85%, at least 90%, at least 95%, at least 97%, or at least 99% sequence identity to the nucleotide sequence set forth in SEQ ID NO: 1. In other embodiments, the PYC gene may be derived from a bacterial source. For example, the PYC gene may be derived from one of the few bacterial species that use only PYC and not PPC (see below) for anaplerosis, such as R. sphaeroides, or from a bacterial species that possesses both PYC and PPC, such as R. etli. The amino acid sequences encoded by the PYC genes of R. sphaeroides and R. etli are set forth in SEQ ID NOs: 3 and 4, respectively. A PYC gene may be derived from a gene encoding the amino acid sequence of SEQ ID NOs: 3 or 4, or from a gene encoding an amino acid sequence with at least 50%, at least 60%, at least 70%, at least 80%, at least 85%, at least 90%, at least 95%, at least 97%, or at least 99% sequence identity to the amino acid sequence of SEQ ID NOs: 3 or 4. Alternatively, the PYC gene may be derived from a PYC gene encoding an enzyme that does not have a dependence on acetyl-CoA for activation, such as a P. fluorescens PYC gene encoding the amino acid sequence set forth in SEQ ID NO: 5 (carboxytransferase subunit) or SEQ ID NO: 6 (biotin carboxylase subunit), a C. glutamicum PYC gene of encoding the amino acid sequence set forth in SEQ ID NO: 7, or a gene encoding an amino acid sequence with at least 50%, at least 60%, at least 70%, at least 80%, at least 85%, at least 90%, at least 95%, at least 97%, or at least 99% sequence identity to the amino acid sequence of SEQ ID NOs: 5, 6, or 7. A PYC gene may also be derived from a PYC gene that encodes an enzyme that is not inhibited by aspartate, such as an S. melioti PYC gene encoding the amino acid sequence set forth in SEQ ID NO: 8 (Sauer FEMS Microbiol Rev 29:765 (2005), or from a gene encoding an amino acid sequence with at least 50%, at least 60%, at least 70%, at least 80%, at least 85%, at least 90%, at least 95%, at least 97%, or at least 99% sequence identity to the amino acid sequence of SEQ ID NO: 8.

[0107] A “PEP carboxylase gene” or “PPC gene” as used herein refers to any gene that encodes a polypeptide with PEP carboxylase activity, meaning the ability to catalyze the conversion of PEP and CO₂ to OAA and phosphate. In certain embodiments, a PPC gene may be derived from a bacterial PPC gene. For example, the PPC gene may be derived from an E. coli PPC gene encoding the amino acid sequence set forth in SEQ ID NO: 10 or an amino acid sequence with at least 50%, at least 60%, at least 70%, at least 80%, at least 85%, at least 90%, at least 95%, at least 97%, or at least 99% sequence identity to the amino acid sequence of SEQ ID NO: 10. In certain embodiments, an E. coli-derived PPC gene may comprise the nucleotide sequence set forth in SEQ ID NO: 9 or a nucleotide sequence with at least 50%, at least 60%, at least 70%, at least 80%, at least 85%, at least 90%, at least 95%, at least 97%, or at least 99% sequence identity to the nucleotide sequence set forth in SEQ ID NO: 9. In other embodiments, a PPC gene may be derived from an “A” type PPC, found in many archea and a limited number of bacteria, that is not activated by acetyl CoA and is less inhibited by aspartate. For example, a PPC gene may be derived from an M. thermoautotrophicum PPC A gene encoding the amino acid sequence set forth in SEQ ID NO: 11, a C. perfringens PPC A gene encoding the amino acid sequence set forth in SEQ ID NO: 12, or a gene encoding an amino acid sequence with at least 50%, at least 60%, at least 70%, at least 80%, at least 85%, at least 90%, at least 95%, at least 97%, or at least 99% sequence identity to the amino acid sequence of SEQ ID NOs: 11 or 12. In certain of these embodiments, the gene may have undergone one or more mutations versus the native gene in order to generate an enzyme with improved characteristics. For example, the gene may have been mutated to encode a PPC polypeptide with increased resistance to aspartate feedback versus the native polypeptide. In other embodiments, the PPC gene may be derived from a plant source.

[0108] An “aspartate aminotransferase gene” or “AAT gene” as used herein refers to any gene that encodes a polypeptide with aspartate aminotransferase activity, meaning the ability to catalyze the conversion of OAA to aspartate. Enzymes having aspartate aminotransferase activity are classified as EC 2.6.1.1. In certain embodiments, an AAT gene may be derived from a yeast source such as I. orientalis or S. cerevisiae. For example, the AAT gene may be derived from an I. orientalis AAT gene encoding the amino acid sequence set forth in SEQ ID NO: 14 or an S. cerevisiae AAT2 gene encoding the amino acid sequence set forth in SEQ ID NO: 15. In other embodiments, the gene may encode an amino acid sequence with at least 50%, at least 60%, at least 70%, at least 80%, at least 85%, at least 90%, at least 95%, at least 97%, or at least 99% sequence identity to the amino acid sequence of SEQ ID NOs: 14 or 15. In certain embodiments, an I. orientalis-derived AAT gene may comprise the nucleotide sequence set forth in SEQ ID NO: 13 or a nucleotide sequence with at least 50%, at least 60%, at least 70%, at least 80%, at least 85%, at least 90%, at least 95%, at least 97%, or at least 99% sequence identity to the nucleotide sequence set forth in SEQ ID NO: 13. In other embodiments, the AAT gene may be derived from a bacterial source. For example, the AAT gene may be derived from an E. coli aspC gene encoding a polypeptide comprising the amino acid sequence set forth in SEQ ID NO: 16. In other embodiments, the gene may encode an amino acid sequence with at least 50%, at least 60%, at least 70%, at least 80%, at least 85%, at least 90%, at least 95%, at least 97%, or at least 99% sequence identity to the amino acid sequence of SEQ ID NO: 16.

[0109] An “aspartate decarboxylase gene” or “ADC gene” as used herein refers to any gene that encodes a polypeptide with aspartate decarboxylase activity, meaning the ability to catalyze the conversion of aspartate to β-alanine. Enzymes having aspartate decarboxylase activity are classified as EC 4.1.1.11. In certain embodiments, an ADC gene may be derived from a bacterial source.

[0110] In some embodiments, the ADC gene may be derived from an S. avermitilis panD gene encoding the amino acid sequence set forth in SEQ ID NO: 17. In some embodiments, the ADC gene may encode an amino acid sequence with at least 50%, at least 60%, at least 70%, at least 80%, at least 85%, at least 90%, at least 95%, at least 97%, or at least 99% sequence identity to the amino acid sequence of SEQ ID NO: 17. In certain embodiments, an S. avermitilis-derived ADC gene may comprise the nucleotide sequence set forth in any one of SEQ ID NOs: 130, 145, 146, or 147; or a nucleotide sequence with at least 50%, at least 60%, at least 70%, at least 80%, at least 85%, at least 90%, at least 95%, at least 97%, or at least 99% sequence identity to the nucleotide sequence set forth in any one of SEQ ID NOs: 130, 145, 146, or 147.

[0111] In other embodiments, the ADC gene may be derived from a C. acetobutylicum panD gene encoding the amino acid sequence set forth in SEQ ID NO: 18. In some embodiments, the ADC gene may encode an amino acid sequence with at least 50%, at least 60%, at least 70%, at least 80%, at least 85%, at least 90%, at least 95%, at least 97%, or at least 99% sequence identity to the amino acid sequence of SEQ ID NO: 18. In certain embodiments, a C. acetobutylicum-derived ADC gene may comprise the nucleotide sequence set forth in SEQ ID NO: 131, or a nucleotide sequence with at least 50%, at least 60%, at least 70%, at least 80%, at least 85%, at least 90%, at least 95%, at least 97%, or at least 99% sequence identity to the nucleotide sequence set forth in SEQ ID NO: 131.

[0112] In other embodiments, the ADC gene may be derived from a H. pylori ADC gene encoding the amino acid sequence set forth in SEQ ID NO: 133. In some embodiments, the ADC gene may encode an amino acid sequence with at least 50%, at least 60%, at least 70%, at least 80%, at least 85%, at least 90%, at least 95%, at least 97%, or at least 99% sequence identity to the amino acid sequence of SEQ ID NO: 133. In certain embodiments, a H. pylori-derived ADC gene may comprise the nucleotide sequence set forth in SEQ ID NO: 133, or a nucleotide sequence with at least 50%, at least 60%, at least 70%, at least 80%, at least 85%, at least 90%, at least 95%, at least 97%, or at least 99% sequence identity to the nucleotide sequence set forth in SEQ ID NO: 133.

[0113] In other embodiments, the ADC gene may be derived from a Bacillus sp. TS25 ADC gene encoding the amino acid sequence set forth in SEQ ID NO: 135. In some embodiments, the ADC gene may encode an amino acid sequence with at least 50%, at least 60%, at least 70%, at least 80%, at least 85%, at least 90%, at least 95%, at least 97%, or at least 99% sequence identity to the amino acid sequence of SEQ ID NO: 135. In certain embodiments, a Bacillus sp. TS25-derived ADC gene may comprise the nucleotide sequence set forth in SEQ ID NO: 134, or a nucleotide sequence with at least 50%, at least 60%, at least 70%, at least 80%, at least 85%, at least 90%, at least 95%, at least 97%, or at least 99% sequence identity to the nucleotide sequence set forth in SEQ ID NO: 134.

[0114] In other embodiments, the ADC gene may be derived from a C. glutamicum ADC gene encoding the amino acid sequence set forth in SEQ ID NO: 137. In some embodiments, the ADC gene may encode an amino acid sequence with at least 50%, at least 60%, at least 70%, at least 80%, at least 85%, at least 90%, at least 95%, at least 97%, or at least 99% sequence identity to the amino acid sequence of SEQ ID NO: 137. In certain embodiments, a C. glutamicum-derived ADC gene may comprise the nucleotide sequence set forth in SEQ ID NO: 136, or a nucleotide sequence with at least 50%, at least 60%, at least 70%, at least 80%, at least 85%, at least 90%, at least 95%, at least 97%, or at least 99% sequence identity to the nucleotide sequence set forth in SEQ ID NO: 136.

[0115] In other embodiments, the ADC gene may be derived from a B. licheniformis ADC gene encoding the amino acid sequence set forth in SEQ ID NO: 139. In some embodiments, the ADC gene may encode an amino acid sequence with at least 50%, at least 60%, at least 70%, at least 80%, at least 85%, at least 90%, at least 95%, at least 97%, or at least 99% sequence identity to the amino acid sequence of SEQ ID NO: 139. In certain embodiments, a B. licheniformis-derived ADC gene may comprise the nucleotide sequence set forth in any one of SEQ ID NOs: 138, 148, 149, 150, or 151; or a nucleotide sequence with at least 50%, at least 60%, at least 70%, at least 80%, at least 85%, at least 90%, at least 95%, at least 97%, or at least 99% sequence identity to the nucleotide sequence set forth in any one of SEQ ID NOs: 138, 148, 149, 150, or 151.

[0116] In other embodiments, the ADC gene may be derived from the Class Insecta (insect) ADC gene, e.g., as described in PCT/US2014/049286 (the content of which is incorporated herein by reference). For example, in some embodiments, the ADC gene may encode an amino acid sequence of the Aedes aegypti ADC of SEQ ID NO: 162, the Culex quinquefasciatus ADC of SEQ ID NO: 163, the Anopheles gambiae ADC of SEQ ID NO: 164, the Tribolium castaneum ADC of SEQ ID NO: 165, the Attagenus smirnovi ADC of SEQ ID NO: 166, the Acyrthosiphon pisum ADC of SEQ ID NO: 167, the Drosophila sechellia ADC of SEQ ID NO: 168, the Drosophila melanogaster ADC of SEQ ID NO: 169, the Danaus plexippus ADC of SEQ ID NO: 170, the Drosophila yakuba ADC of SEQ ID NO: 171, the Drosophila erecta ADC of SEQ ID NO: 172, the Papilio xuthus ADC of SEQ ID NO: 173, the Drosophila persimilis ADC of SEQ ID NO: 174, the Bombyx mori ADC of SEQ ID NO: 175, the Drosophila ananassae ADC of SEQ ID NO: 176, the Drosophila mojavensis ADC of SEQ ID NO: 177, the Drosophila grimshawi ADC of SEQ ID NO: 178, the Biston betularia ADC of SEQ ID NO: 179, the Drosophila willistoni ADC of SEQ ID NO: 180, the Apis mellifera ADC of SEQ ID NO: 181, the Drosophila virilis ADC of SEQ ID NO: 182, the Nasonia vitripennis ADC of SEQ ID NO: 183, the Bicyclus anynana ADC of SEQ ID NO: 184, the Harpegnathos saltator ADC of SEQ ID NO: 185, the Acromyrmex echinatior ADC of SEQ ID NO: 186, the Camponotus floridanus ADC of SEQ ID NO: 187, the Pediculus humanus ADC of SEQ ID NO: 188, the Atta cephalotes ADC of SEQ ID NO: 189, the Meligethes aeneus ADC of SEQ ID NO: 190, or the Solenopsis invicta ADC of SEQ ID NO: 191. In another aspect is a recombinant cell comprising an aspartate 1-decarboxylase (ADC) of the Class Bivalvia, Branchiopoda, Gastropoda, or Leptocardii, such as the Daphnia pulex ADC of SEQ ID NO: 192, the Lottia gigantea ADC of SEQ ID NO: 193, the Branchiostoma floridae ADC of SEQ ID NO: 194, or the Crassostrea gigas ADC of SEQ ID NO: 195. In some embodiments, the ADC gene may encode an amino acid sequence with at least 50%, at least 60%, at least 70%, at least 80%, at least 85%, at least 90%, at least 95%, at least 97%, or at least 99% sequence identity to the amino acid sequence of any one of SEQ ID NOs: 162-195.

[0117] A “β-alanine aminotransferase gene” or “BAAT gene” as used herein refers to any gene that encodes a polypeptide with β-alanine aminotransferase activity, meaning the ability to catalyze the conversion of β-alanine to malonate semialdehyde. Enzymes having β-alanine aminotransferase activity are classified as EC 2.6.1.19. In certain embodiments, a BAAT gene may be derived from a yeast source. For example, a BAAT gene may be derived from the I. orientalis homolog to the pyd4 gene encoding the amino acid sequence set forth in SEQ ID NO: 20. In some embodiments, the BAAT gene may encode an amino acid sequence with at least 50%, at least 60%, at least 70%, at least 80%, at least 85%, at least 90%, at least 95%, at least 97%, or at least 99% sequence identity to the amino acid sequence of SEQ ID NO: 20. In certain embodiments, an I. orientalis-derived BAAT gene may comprise the nucleotide sequence set forth in SEQ ID NO: 19 or a nucleotide sequence with at least 50%, at least 60%, at least 70%, at least 80%, at least 85%, at least 90%, at least 95%, at least 97%, or at least 99% sequence identity to the nucleotide sequence set forth in SEQ ID NO: 19. In other embodiments, the BAAT gene may be derived from the S. kluyveri pyd4 gene encoding the amino acid sequence set forth in SEQ ID NO: 21. In some embodiments, the BAAT gene may encode an amino acid sequence with at least 50%, at least 60%, at least 70%, at least 80%, at least 85%, at least 90%, at least 95%, at least 97%, or at least 99% sequence identity to the amino acid sequence of SEQ ID NO: 21. In certain embodiments, a S. kluyveri-derived BAAT gene may comprise the nucleotide sequence set forth in SEQ ID NO: 142 or a nucleotide sequence with at least 50%, at least 60%, at least 70%, at least 80%, at least 85%, at least 90%, at least 95%, at least 97%, or at least 99% sequence identity to the nucleotide sequence set forth in SEQ ID NO: 142. In other embodiments, the BAAT gene may be derived from a bacterial source. For example, a BAAT gene may be derived from an S. avermitilis BAAT gene encoding the amino acid sequence set forth in SEQ ID NO: 22. In some embodiments, the BAAT gene may encode an amino acid sequence with at least 50%, at least 60%, at least 70%, at least 80%, at least 85%, at least 90%, at least 95%, at least 97%, or at least 99% sequence identity to the amino acid sequence of SEQ ID NO: 22. In certain embodiments, a S. avermitilis-derived BAAT gene may comprise the nucleotide sequence set forth in SEQ ID NO: 140 or a nucleotide sequence with at least 50%, at least 60%, at least 70%, at least 80%, at least 85%, at least 90%, at least 95%, at least 97%, or at least 99% sequence identity to the nucleotide sequence set forth in SEQ ID NO: 140.

[0118] A BAAT gene may also be a “4-aminobutyrate aminotransferase” or “gabT gene” meaning that it has native activity on 4-aminobutyrate as well as β-alanine. Alternatively, a BAAT gene may be derived by random or directed engineering of a native gabT gene from a bacterial or yeast source to encode a polypeptide with BAAT activity. For example, a BAAT gene may be derived from the S. avermitilis gabT encoding the amino acid sequence set forth in SEQ ID NO: 23. In some embodiments, the S. avermitilis-derived BAAT gene may encode an amino acid sequence with at least 50%, at least 60%, at least 70%, at least 80%, at least 85%, at least 90%, at least 95%, at least 97%, or at least 99% sequence identity to the amino acid sequence of SEQ ID NO: 23. In other embodiments, a BAAT gene may be derived from the S. cerevisiae gabT gene UGA1 encoding the amino acid sequence set forth in SEQ ID NO: 24. In some embodiments, the S. cerevisiae-derived BAAT gene may encode an amino acid sequence with at least 50%, at least 60%, at least 70%, at least 80%, at least 85%, at least 90%, at least 95%, at least 97%, or at least 99% sequence identity to the amino acid sequence of SEQ ID NO: 24. In certain embodiments, an S. cerevisiae-derived BAAT gene may comprise the nucleotide sequence set forth in SEQ ID NO: 141 or a nucleotide sequence with at least 50%, at least 60%, at least 70%, at least 80%, at least 85%, at least 90%, at least 95%, at least 97%, or at least 99% sequence identity to the nucleotide sequence set forth in SEQ ID NO: 141.

[0119] In addition to a 3-HPDH gene used to encode the polypeptides of SEQ ID NO: 197, SEQ ID NO: 199, SEQ ID NO: 201, or SEQ ID NO: 203, the recombinant cell may optionally comprise one or more (e.g., two, several) additional 3-HPDH gene(s). In certain embodiments, the additional 3-HPDH gene may be derived from a yeast source. For example, the additional 3-HPDH gene may be derived from the I. orientalis homolog to the YMR226C gene encoding the amino acid sequence set forth in SEQ ID NO: 26. In some embodiments, the additional 3-HPDH gene may encode an amino acid sequence with at least 50%, at least 60%, at least 70%, at least 80%, at least 85%, at least 90%, at least 95%, at least 97%, or at least 99% sequence identity to the amino acid sequence of SEQ ID NO: 26. In certain embodiments, the additional I. orientalis-derived 3-HPDH gene may comprise the nucleotide sequence set forth in SEQ ID NO: 25 or a nucleotide sequence with at least 50%, at least 60%, at least 70%, at least 80%, at least 85%, at least 90%, at least 95%, at least 97%, or at least 99% sequence identity to the nucleotide sequence set forth in SEQ ID NO: 25. In other embodiments, the additional 3-HPDH gene may be derived from the S. cerevisiae YMR226C gene encoding the amino acid sequence set forth in SEQ ID NO: 129. In some embodiments, the additional 3-HPDH gene may encode an amino acid sequence with at least 50%, at least 60%, at least 70%, at least 80%, at least 85%, at least 90%, at least 95%, at least 97%, or at least 99% sequence identity to the amino acid sequence of SEQ ID NO: 129. In certain embodiments, the additional S. cerevisiae-derived 3-HPDH gene may comprise the nucleotide sequence set forth in SEQ ID NO: 144 or a nucleotide sequence with at least 50%, at least 60%, at least 70%, at least 80%, at least 85%, at least 90%, at least 95%, at least 97%, or at least 99% sequence identity to the nucleotide sequence set forth in SEQ ID NO: 144.

[0120] In other embodiments, the additional 3-HPDH gene may be derived from a bacterial source. For example, a 3-HPDH gene may be derived from an E. coli ydfG gene encoding the amino acid sequence in SEQ ID NO: 27. In some embodiments, the additional 3-HPDH gene may encode an amino acid sequence with at least 50%, at least 60%, at least 70%, at least 80%, at least 85%, at least 90%, at least 95%, at least 97%, or at least 99% sequence identity to the amino acid sequence of SEQ ID NO: 27. In certain embodiments, the additional E. coli-derived 3-HPDH gene may comprise the nucleotide sequence set forth in SEQ ID NO: 143 or a nucleotide sequence with at least 50%, at least 60%, at least 70%, at least 80%, at least 85%, at least 90%, at least 95%, at least 97%, or at least 99% sequence identity to the nucleotide sequence set forth in SEQ ID NO: 143. In other embodiments, the additional 3-HPDH gene may be derived from an M. sedula malonate semialdehyde reductase gene encoding the amino acid sequence set forth in SEQ ID NO: 29. In some embodiments, the additional 3-HPDH gene may encode an amino acid sequence with at least 50%, at least 60%, at least 70%, at least 80%, at least 85%, at least 90%, at least 95%, at least 97%, or at least 99% sequence identity to the amino acid sequence set forth in SEQ ID NO: 29. In certain embodiments, the additional M. sedula-derived 3-HPDH gene may comprise the nucleotide sequence set forth in SEQ ID NO: 152 or a nucleotide sequence with at least 50%, at least 60%, at least 70%, at least 80%, at least 85%, at least 90%, at least 95%, at least 97%, or at least 99% sequence identity to the nucleotide sequence set forth in SEQ ID NO: 152.

[0121] In certain embodiments, the additional 3-HPDH gene may be a natural or engineered gene having an increased specificity for NAD(H) compared to NADP(H). 3-HPDA variants having increased specificity for NAD(H) are described in WO 2013/049073 (the content of which is incorporated herein by reference).

[0122] A “3-hydroxyisobutyrate dehydrogenase gene” or “HIBADH gene” as used herein refers to any gene that encodes a polypeptide with 3-hydroxyisobutyrate dehydrogenase activity, meaning the ability to catalyze the conversion of 3-hydroxyisobutyrate to methylmalonate semialdehyde. Enzymes having 3-hydroxyisobutyrate dehydrogenase activity are classified as EC 1.1.1.31. Some 3-hydroxyisobutyrate dehydrogenases also have 3-HPDH activity. In certain embodiments, an HIBADH gene may be derived from a bacterial source. For example, an HIBADH gene may be derived from an A. faecalis M3A gene encoding the amino acid sequence set forth in SEQ ID NO: 28, a P. putida KT2440 or E23440 mmsB gene encoding the amino acid sequence set forth in SEQ ID NO: 30 or SEQ ID NO: 31, respectively, or a P. aeruginosa PAO1 mmsB gene encoding the amino acid sequence set forth in SEQ ID NO: 32. In certain embodiments, an HIBADH gene may encode an amino acid sequence with at least 50%, at least 60%, at least 70%, at least 80%, at least 85%, at least 90%, at least 95%, at least 97%, or at least 99% sequence identity to the amino acid sequence set forth in SEQ ID NOs: 28, 30, 31, or 32.

[0123] A “4-hydroxybutyrate dehydrogenase gene” as used herein refers to any gene that encodes a polypeptide with 4-hydroxybutyrate dehydrogenase activity, meaning the ability to catalyze the conversion of 4-hydroxybutanoate to succinate semialdehyde. Enzymes having 4-hydroxybutyrate dehydrogenase activity are classified as EC 1.1.1.61. Some 4-hydroxybutyrate dehydrogenases also have 3-HPDH activity. In certain embodiments, a 4-hydroxybutyrate dehydrogenase gene may be derived from a bacterial source. For example, a 4-hydroxybutyrate dehydrogenase gene may be derived from a R. eutropha H16 4hbd gene encoding the amino acid sequence set forth in SEQ ID NO: 33 or a C. kluyveri DSM 555 hbd gene encoding the amino acid sequence set forth in SEQ ID NO: 34. In other embodiments, the gene may encode an amino acid sequence with at least 50%, at least 60%, at least 70%, at least 80%, at least 85%, at least 90%, at least 95%, at least 97%, or at least 99% sequence identity to the amino acid sequence set forth in SEQ ID NOs: 33 or 34.

[0124] A “PEP carboxykinase gene” or “PCK gene” as used herein refers to any gene that encodes a polypeptide with PEP carboxykinase activity, meaning the ability to catalyze the conversion of PEP, CO₂, and ADP or GDP to OAA and ATP or GTP, or vice versa. Enzymes having PEP carboxykinase activity are classified as EC 4.1.1.32 (GTP/GDP utilizing) and EC 4.1.1.49 (ATP/ADP utilizing). In certain embodiments, a PCK gene may be derived from a yeast source. In other embodiments, a PCK gene may be derived from a bacterial source, and in certain of these embodiments the gene may be derived from a bacteria in which the PCK reaction favors the production of OAA rather than the more common form of the reaction where decarboxylation is dominant. For example, a PCK gene may be derived from an M. succiniciproducens PCK gene encoding the amino acid sequence set forth in SEQ ID NO: 35, an A. succiniciproducens PCK gene encoding the amino acid sequence set forth in SEQ ID NO: 36, an A. succinogenes PCK gene encoding the amino acid sequence set forth in SEQ ID NO: 37, or an R. eutropha PCK gene encoding the amino acid sequence set forth in SEQ ID NO: 38. In other embodiments, a PCK gene has undergone one or more mutations versus the native gene from which it was derived, such that the resultant gene encodes a polypeptide that preferably catalyzes the conversion of PEP to OAA. For example, a PCK gene may be derived from an E. coli K12 strain PCK gene encoding the amino acid sequence set forth in SEQ ID NO: 39, where the gene has been mutated to preferably catalyze the conversion of PEP to OAA. In other embodiments the conversion of PEP to OAA is catalyzed by a PEP carboxytransphosphorylase such as is found in propionic acid bacteria (e.g., P. shermanii, A. woodii) which use inorganic phosphate and diphosphate rather than ATP/ADP or GTP/GDP.

[0125] A “malate dehydrogenase gene” as used herein refers to any gene that encodes a polypeptide with malate dehydrogenase activity, meaning the ability to catalyze the conversion of OAA to malate. In certain embodiments, a malate dehydrogenase gene may be derived from a bacterial or yeast source.

[0126] A “malate decarboxylase gene” as used herein refers to any gene that encodes a polypeptide with malate decarboxylase activity, meaning the ability to catalyze the conversion of malate to 3-HP. Malate decarboxylase activity is not known to occur naturally. Therefore, a malate decarboxylase gene may be derived by incorporating one or more mutations into a native source gene that encodes a polypeptide with acetolactate decarboxylase activity. Polypeptides with acetolactate decarboxylase activity catalyze the conversion of 2-hydroxy-2-methyl-3-oxobutanoate to 2-acetoin, and are classified as EC 4.1.1.5. In certain embodiments, a malate decarboxylase gene may be derived from a bacterial source. For example, a malate decarboxylase gene may be derived from an L. lactis aldB gene encoding the amino acid sequence set forth in SEQ ID NO: 40, an S. thermophilus aldB gene encoding the amino acid sequence set forth in SEQ ID NO: 41, a B. brevis aldB gene encoding the amino acid sequence set forth in SEQ ID NO: 42, or a E. aerogenes budA gene encoding the amino acid sequence set forth in SEQ ID NO: 43.

[0127] An “alpha-ketoglutarate (AKG) decarboxylase gene” or “KGD gene” as used herein refers to any gene that encodes a polypeptide with alpha-ketoglutarate decarboxylase activity, meaning the ability to catalyze the conversion of alpha-ketoglutarate (2-oxoglutarate) to succinate semialdehyde. Enzymes having AKG decarboxylase activity are classified as EC 4.1.1.71. A KGD gene may be used to derive a gene encoding a polypeptide capable of catalyzing the conversion of OAA to malonate semialdehyde. This activity may be found in a native KGD gene, or it may derived by incorporating one or more mutations into a native KGD gene. In certain embodiments, a KGD gene may be derived from a bacterial source. For example, a KGD gene may be derived from a M. tuberculosis KGD gene encoding the amino acid sequence set forth in SEQ ID NO: 44, a B. japonicum KGD gene encoding the amino acid sequence set forth in SEQ ID NO: 45, or a M. loti (aka Rhizobium loti) KGD gene encoding the amino acid sequence set forth in SEQ ID NO: 46.

[0128] A “branched-chain alpha-keto acid decarboxylase gene” or “BCKA gene” as used herein refers to any gene that encodes a polypeptide with branched-chain alpha-keto acid decarboxylase activity, which can serve to decarboxylate a range of alpha-keto acids from three to six carbons in length. Enzymes having BCKA activity are classified as EC 4.1.1.72. A BCKA gene may be used to derive a gene encoding a polypeptide capable of catalyzing the conversion of OAA to malonate semialdehyde. This activity may be found in a native BCKA gene, or it may be derived by incorporating one or more mutations into a native BCKA gene. In certain embodiments, a BCKA gene may be derived from a bacterial source. For example, a BCKA gene may be derived from a L. lactis kdcA gene encoding the amino acid sequence set forth in SEQ ID NO: 47.

[0129] An “indolepyruvate decarboxylase gene” or “IPDA gene” as used herein refers to any gene that encodes a polypeptide with indolepyruvate decarboxylase activity, meaning the ability to catalyze the conversion of indolepyruvate to indoleacetaldehyde. Enzymes having IPDA activity are classified as EC 4.1.1.74. An IPDA gene may be used to derive a gene encoding a polypeptide capable of catalyzing the conversion of OAA to malonate semialdehyde. This activity may be found in a native IPDA gene, or it may be derived by incorporating one or more mutations into a native IPDA gene. In certain embodiments, an indolepyruvate decarboxylase gene may be derived from a yeast, bacterial, or plant source.

[0130] A “pyruvate decarboxylase gene” or “PDC gene” as used herein refers to any gene that encodes a polypeptide with pyruvate decarboxylase activity, meaning the ability to catalyze the conversion of pyruvate to acetaldehyde. Enzymes having PDC activity are classified as EC 4.1.1.1. In preferred embodiments, a PDC gene that is incorporated into a recombinant cell as provided herein has undergone one or more mutations versus the native gene from which it was derived such that the resultant gene encodes a polypeptide capable of catalyzing the conversion of OAA to malonate semialdehyde. In certain embodiments, a PDC gene may be derived from a yeast source. For example, a PDC gene may be derived from an I. orientalis PDC gene encoding the amino acid sequence set forth in SEQ ID NO: 49, an S. cerevisiae PDC1 gene encoding the amino acid sequence set forth in SEQ ID NO: 50, or a K. lactis PDC encoding the amino acid sequence set forth in SEQ ID NO: 51. In certain embodiments, a PDC gene derived from the I. orientalis PDC gene may comprise the nucleotide sequence set forth in SEQ ID NO: 48 or a nucleotide sequence with at least 50%, at least 60%, at least 70%, at least 80%, at least 85%, at least 90%, at least 95%, at least 97%, or at least 99% sequence identity to the nucleotide sequence set forth in SEQ ID NO: 48. In other embodiments, a PDC gene may be derived from a bacterial source. For example, a PDC gene may be derived from a Z. mobilis PDC gene encoding the amino acid sequence set forth in SEQ ID NO: 52 or an A. pasteurianus PDC gene encoding the amino acid sequence set forth in SEQ ID NO: 53.

[0131] A “benzoylformate decarboxylase” gene as used herein refers to any gene that encodes a polypeptide with benzoylformate decarboxylase activity, meaning the ability to catalyze the conversion of benzoylformate to benzaldehyde. Enzymes having benzoylformate decarboxylase activity are classified as EC 4.1.1.7. In preferred embodiments, a benzoylformate decarboxylase gene that is incorporated into a recombinant cell as provided herein has undergone one or more mutations versus the native gene from which it was derived such that the resultant gene encodes a polypeptide capable of catalyzing the conversion of OAA to malonate semialdehyde. In certain embodiments, a benzoylformate decarboxylase gene may be derived from a bacterial source. For example, a benzoylformate decarboxylase gene may be derived from a P. putida mdlC gene encoding the amino acid sequence set forth in SEQ ID NO: 54, a P. aeruginosa mdlC gene encoding the amino acid sequence set forth in SEQ ID NO: 55, a P. stutzeri dpgB gene encoding the amino acid sequence set forth in SEQ ID NO: 56, or a P. fluorescens ilvB-1 gene encoding the amino acid sequence set forth in SEQ ID NO: 57.

[0132] An “OAA formatelyase gene” as used herein refers to any gene that encodes a polypeptide with OAA formatelyase activity, meaning the ability to catalyze the conversion of an acylate ketoacid to its corresponding CoA derivative. A polypeptide encoded by an OAA formatelyase gene may have activity on pyruvate or on another ketoacid. In certain embodiments, an OAA formatelyase gene encodes a polypeptide that converts OAA to malonyl-CoA.

[0133] A “malonyl-CoA reductase gene” as used herein refers to any gene that encodes a polypeptide with malonyl-CoA reductase activity, meaning the ability to catalyze the conversion of malonyl-CoA to malonate semialdehyde (also referred to as Co-A acylating malonate semialdehyde dehydrogenase activity). In certain embodiments, a malonyl-CoA reductase gene may be derived from a bifunctional malonyl-CoA reductase gene which also has the ability to catalyze the conversion of malonate semialdehyde to 3-HP. In certain of these embodiments, a malonyl-CoA reductase gene may be derived from a bacterial source. For example, a malonyl-CoA reductase gene may be derived from a C. aurantiacus malonyl-CoA reductase gene encoding the amino acid sequence set forth in SEQ ID NO: 58, an R. castenholzii malonyl-CoA reductase gene encoding the amino acid sequence set forth in SEQ ID NO: 59, or an Erythrobacter sp. NAP1 malonyl-CoA reductase gene encoding the amino acid sequence set forth in SEQ ID NO: 60. In other embodiments, a malonyl-CoA reductase gene may be derived from a malonyl-CoA reductase gene encoding a polypeptide that only catalyzes the conversion of malonyl-CoA to malonate semialdehyde. For example, a malonyl-CoA reductase gene may be derived from an M. sedula Msed_0709 gene encoding the amino acid sequence set forth in SEQ ID NO: 61 or a S. tokodaii malonyl-CoA reductase encoding the amino acid sequence set forth in SEQ ID NO: 62.

[0134] A “pyruvate dehydrogenase gene” or “PDH gene” as used herein refers to any gene that encodes a polypeptide with pyruvate dehydrogenase activity, meaning the ability to catalyze the conversion of pyruvate to acetyl-CoA. In certain embodiments, a PDH gene may be derived from a yeast source. For example, a PDH gene may be derived from an S. cerevisiae LAT1, PDA1, PDB1, or LPD gene encoding the amino acid sequence set forth in SEQ ID NOs: 63-66, respectively. In other embodiments, a PDH gene may be derived from a bacterial source. For example, a PDH gene may be derived from an E. coli strain K12 substr. MG1655 aceE, aceF, or lpd gene encoding the amino acid sequence set forth in SEQ ID NOs: 67-69, respectively, or a B. subtilis pdhA, pdhB, pdhC, or pdhD gene encoding the amino acid sequence set forth in SEQ ID NOs: 70-73, respectively.

[0135] An “acetyl-CoA carboxylase gene” or “ACC gene” as used herein refers to any gene that encodes a polypeptide with acetyl-CoA carboxylase activity, meaning the ability to catalyze the conversion of acetyl-CoA to malonyl-CoA. Enzymes having acetyl-CoA carboxylase activity are classified as EC 6.4.1.2. In certain embodiments, an acetyl-CoA carboxylase gene may be derived from a yeast source. For example, an acetyl-CoA carboxylase gene may be derived from an S. cerevisiae ACC1 gene encoding the amino acid sequence set forth in SEQ ID NO: 74. In other embodiments, an acetyl-CoA carboxylase gene may be derived from a bacterial source. For example, an acetyl-CoA carboxylase gene may be derived from an E. coli accA, accB, accC, or accD gene encoding the amino acid sequence set forth in SEQ ID NOs: 75-78, respectively, or a C. aurantiacus accA, accB, accC, or accD gene encoding the amino acid sequence set forth in SEQ ID NOs: 79-82, respectively.

[0136] An “alanine dehydrogenase gene” as used herein refers to any gene that encodes a polypeptide with alanine dehydrogenase activity, meaning the ability to catalyze the NAD-dependent reductive amination of pyruvate to alanine. Enzymes having alanine dehydrogenase activity are classified as EC 1.4.1.1. In certain embodiments, an alanine dehydrogenase gene may be derived from a bacterial source. For example, an alanine dehydrogenase gene may be derived from a B. subtilis alanine dehydrogenase gene encoding the amino acid sequence set forth in SEQ ID NO: 83.

[0137] A “pyruvate/alanine aminotransferase gene” as used herein refers to any gene that encodes a polypeptide with pyruvate/alanine aminotransferase activity, meaning the ability to catalyze the conversion of pyruvate and L-glutamate to alanine and 2-oxoglutarate. In certain embodiments, a pyruvate/alanine aminotransferase gene is derived from a yeast source. For example, a pyruvate/alanine aminotransferase gene may be derived from an S. pombe pyruvate/alanine aminotransferase gene encoding the amino acid sequence set forth in SEQ ID NO: 84 or an S. cerevisiae ALT2 gene encoding the amino acid sequence set forth in SEQ ID NO: 85.

[0138] An “alanine 2,3 aminomutase gene” or “AAM gene” as used herein refers to a gene that encodes a polypeptide with alanine 2,3 aminomutase activity, meaning the ability to catalyze the conversion of alanine to β-alanine. Alanine 2,3 aminomutase activity is not known to occur naturally. Therefore, an alanine 2,3 aminomutase gene can be derived by incorporating one or more mutations into a native source gene that encodes a polypeptide with similar activity such as lysine 2,3 aminomutase activity (see, e.g., U.S. Pat. No. 7,309,597). In certain embodiments, the native source gene may be a B. subtilis lysine 2,3 aminomutase gene encoding the amino acid sequence set forth in SEQ ID NO: 86, a P. gingivalis lysine 2,3 aminomutase gene encoding the amino acid sequence set forth in SEQ ID NO: 87, or a F. nucleatum (ATCC-10953) lysine 2,3 aminomutase gene encoding the amino acid sequence set forth in SEQ ID NO: 88.

[0139] A “CoA transferase gene” as used herein refers to any gene that encodes a polypeptide with CoA transferase activity, which in one example includes the ability to catalyze the conversion of β-alanine to β-alanyl-CoA and/or the conversion of lactate to lactyl-CoA. In certain embodiments, a CoA transferase gene may be derived from a yeast source. In other embodiments, a CoA transferase gene may be derived from a bacterial source. For example, a CoA transferase gene may be derived from an M. elsdenii CoA transferase gene encoding the amino acid sequence set forth in SEQ ID NO: 89.

[0140] A “CoA synthetase gene” as used herein refers to any gene that encodes a polypeptide with CoA synthetase activity. In one example this includes the ability to catalyze the conversion of β-alanine to β-alanyl-CoA. In another example, this includes the ability to catalyze the conversion of lactate to lactyl-CoA. In certain embodiments, a CoA synthetase gene may be derived from a yeast source. For example, a CoA synthetase gene may be derived from an S. cerevisiae CoA synthetase gene. In other embodiments, a CoA synthetase gene may be derived from a bacterial source. For example, a CoA synthetase gene may be derived from an E. coli CoA synthetase, R. sphaeroides, or S. enterica CoA synthetase gene.

[0141] A “β-alanyl-CoA ammonia lyase gene” as used herein refers to any gene that encodes a polypeptide with β-alanyl-CoA ammonia lyase activity, meaning the ability to catalyze the conversion of β-alanyl-CoA to acrylyl-CoA. In certain embodiments, a β-alanyl-CoA ammonia lyase gene may be derived from a bacterial source, such as a C. propionicum β-alanyl-CoA ammonia lyase gene encoding the amino acid sequence set forth in SEQ ID NO: 90.

[0142] A “3-HP-CoA dehydratase gene” or “acrylyl-CoA hydratase gene” as used herein refers to any gene that encodes a polypeptide with 3-HP-CoA dehydratase gene activity, meaning the ability to catalyze the conversion of acrylyl-CoA to 3-HP-CoA. Enzymes having 3-HP-CoA dehydratase activity are classified as EC 4.2.1.116. In certain embodiments, a 3-HP-CoA dehydratase gene may be derived from a yeast or fungal source, such as a P. sojae 3-HP-CoA dehydratase gene encoding the amino acid sequence set forth in SEQ ID NO: 91. In other embodiments, a 3-HP-CoA dehydratase gene may be derived from a bacterial source. For example, a 3-HP-CoA dehydratase gene may be derived from a C. aurantiacus 3-HP-CoA dehydratase gene encoding the amino acid sequence set forth in SEQ ID NO: 92, an R. rubrum 3-HP-CoA dehydratase gene encoding the amino acid sequence set forth in SEQ ID NO: 93, or an R. capsulates 3-HP-CoA dehydratase gene encoding the amino acid sequence set forth in SEQ ID NO: 94. In still other embodiments, a 3-HP-CoA dehydratase gene may be derived from a mammalian source. For example, a 3-HP-CoA dehydratase gene may be derived from a H. sapiens 3-HP-CoA dehydratase gene encoding the amino acid sequence set forth in SEQ ID NO: 95.

[0143] A “3-HP-CoA hydrolase gene” as used herein refers to any gene that encodes a polypeptide with 3-HP-CoA hydrolase activity, meaning the ability to catalyze the conversion of 3-HP-CoA to 3-HP. In certain embodiments, a 3-HP-CoA gene may be derived from a yeast or fungal source. In other embodiments, a 3-HP-CoA gene may be derived from a bacterial or mammalian source.

[0144] A “3-hydroxyisobutyryl-CoA hydrolase gene” as used herein refers to any gene that encodes a polypeptide with 3-hydroxyisobutyryl-CoA hydrolase activity, which in one example includes the ability to catalyze the conversion of 3-HP-CoA to 3-HP. In certain embodiments, a 3-hydroxyisobutyryl-CoA hydrolase gene may be derived from a bacterial source, such as a P. fluorescens 3-hydroxyisobutyryl-CoA hydrolase gene encoding the amino acid sequence set forth in SEQ ID NO: 96 or a B. cereus 3-hydroxyisobutyryl-CoA hydrolase gene encoding the amino acid sequence set forth in SEQ ID NO: 97. In other embodiments, a 3-hydroxyisobutyryl-CoA hydrolase gene may be derived from a mammalian source, such as a H. sapiens 3-hydroxyisobutyryl-CoA hydrolase gene encoding the amino acid sequence set forth in SEQ ID NO: 98.

[0145] A “lactate dehydrogenase gene” or “LDH gene” as used herein refers to any gene that encodes a polypeptide with lactate dehydrogenase activity, meaning the ability to catalyze the conversion of pyruvate to lactate. In certain embodiments, an LDH gene may be derived from a fungal, bacterial, or mammalian source.

[0146] A “lactyl-CoA dehydratase gene” as used herein refers to any gene that encodes a polypeptide with lactyl-CoA dehydratase activity, meaning the ability to catalyze the conversion of lactyl-CoA to acrylyl-CoA. In certain embodiments, a lactyl-CoA dehydratase gene may be derived from a bacterial source. For example, a lactyl-CoA dehydratase gene may be derived from an M. elsdenii lactyl-CoA dehydratase E1, EIIa, or EIIb subunit gene encoding the amino acid sequence set forth in SEQ ID NOs: 99-101.

[0147] An “aldehyde dehydrogenase gene” as used herein refers to any gene that encodes a polypeptide with aldehyde dehydrogenase activity, which in one example includes the ability to catalyze the conversion of 3-HPA to 3-HP and vice versa. In certain embodiments, an aldehyde dehydrogenase gene may be derived from a yeast source, such as an S. cerevisiae aldehyde dehydrogenase gene encoding the amino acid sequence set forth in SEQ ID NO: 102 or an I. orientalis aldehyde dehydrogenase gene encoding the amino acid sequence set forth in SEQ ID NOs: 122, 124, or 126. In other embodiments, an aldehyde dehydrogenase may be derived from a bacterial source, such as an E. coli aldH gene encoding the amino acid sequence set forth in SEQ ID NO: 103 or a K. pneumoniae aldehyde dehydrogenase gene encoding the amino acid sequence set forth in SEQ ID NO: 104.

[0148] A “glycerol dehydratase gene” as used herein refers to any gene that encodes a polypeptide with glycerol dehydratase activity, meaning the ability to catalyze the conversion of glycerol to 3-HPA. In certain embodiments, a glycerol dehydratase gene may be derived from a bacterial source, such as a K. pneumonia or C. freundii glycerol dehydratase gene.

[0149] The enzymes of the selected active 3-HP pathway, and activities thereof, can be detected using methods known in the art or as described herein. These detection methods may include use of specific antibodies, formation of an enzyme product, or disappearance of an enzyme substrate. See, for example, Sambrook et al., Molecular Cloning: A Laboratory Manual, Third Ed., Cold Spring Harbor Laboratory, New York (2001); Ausubel et al., Current Protocols in Molecular Biology, John Wiley and Sons, Baltimore, Md. (1999); and Hanai et al., Appl. Environ. Microbiol. 73:7814-7818 (2007)).

### Hosts, Expression Vectors and Nucleic Acid Constructs

[0150] The recombinant cells described herein may be selected from any host cell capable of having an active 3-HP pathway. Those skilled in the art will understand that the genetic alterations, including metabolic modifications exemplified herein, may be described with reference to a suitable host organism and their corresponding metabolic reactions or a suitable source organism for desired genetic material such as genes for a desired metabolic pathway. However, given the complete genome sequencing of a wide variety of organisms and the high level of skill in the area of genomics, those skilled in the art can apply the teachings and guidance provided herein to other organisms. For example, the metabolic alterations exemplified herein can readily be applied to other species by incorporating the same or analogous encoding nucleic acid from species other than the referenced species.

[0151] The recombinant host cell may be any Gram-positive or Gram-negative bacterium. Gram-positive bacteria include, but are not limited to, Bacillus, Clostridium, Enterococcus, Geobacillus, Lactobacillus, Lactococcus, Oceanobacillus, Staphylococcus, Streptococcus, and Streptomyces. Gram-negative bacteria include, but are not limited to, Campylobacter, E. coli, Flavobacterium, Fusobacterium, Helicobacter, Ilyobacter, Neisseria, Pseudomonas, Salmonella, and Ureaplasma.

[0152] The bacterial host cell may be any Bacillus cell including, but not limited to, Bacillus alkalophilus, Bacillus amyloliquefaciens, Bacillus brevis, Bacillus circulans, Bacillus clausii, Bacillus coagulans, Bacillus firmus, Bacillus lautus, Bacillus lentus, Bacillus licheniformis, Bacillus megaterium, Bacillus pumilus, Bacillus stearothermophilus, Bacillus subtilis, and Bacillus thuringiensis cells.

[0153] The bacterial host cell may also be any Streptococcus cell including, but not limited to, Streptococcus equisimilis, Streptococcus pyogenes, Streptococcus uberis, and Streptococcus equi subsp. Zooepidemicus cells.

[0154] The bacterial host cell may also be any Streptomyces cell, including, but not limited to, Streptomyces achromogenes, Streptomyces avermitilis, Streptomyces coelicolor, Streptomyces griseus, and Streptomyces lividans cells.

[0155] The introduction of DNA into a Bacillus cell may be effected by protoplast transformation (see, e.g., Chang and Cohen, 1979, Mol. Gen. Genet. 168: 111-115), competent cell transformation (see, e.g., Young and Spizizen, 1961, J. Bacteriol. 81: 823-829, or Dubnau and Davidoff-Abelson, 1971, J. Mol. Biol. 56: 209-221), electroporation (see, e.g., Shigekawa and Dower, 1988, Biotechniques 6: 742-751), or conjugation (see, e.g., Koehler and Thorne, 1987, J. Bacteriol. 169: 5271-5278). The introduction of DNA into an E. coli cell may be effected by protoplast transformation (see, e.g., Hanahan, 1983, J. Mol. Biol. 166: 557-580) or electroporation (see, e.g., Dower et al., 1988, Nucleic Acids Res. 16: 6127-6145). The introduction of DNA into a Streptomyces cell may be effected by protoplast transformation, electroporation (see, e.g., Gong et al., 2004, Folia Microbiol. (Praha) 49: 399-405), conjugation (see, e.g., Mazodier et al., 1989, J. Bacteriol. 171: 3583-3585), or transduction (see, e.g., Burke et al., 2001, Proc. Natl. Acad. Sci. USA 98: 6289-6294). The introduction of DNA into a Pseudomonas cell may be effected by electroporation (see, e.g., Choi et al., 2006, J. Microbiol. Methods 64: 391-397), or conjugation (see, e.g., Pinedo and Smets, 2005, Appl. Environ. Microbiol. 71: 51-57). The introduction of DNA into a Streptococcus cell may be effected by natural competence (see, e.g., Perry and Kuramitsu, 1981, Infect. Immun. 32: 1295-1297), protoplast transformation (see, e.g., Catt and Jollick, 1991, Microbios 68: 189-207), electroporation (see, e.g., Buckley et al., 1999, Appl. Environ. Microbiol. 65: 3800-3804) or conjugation (see, e.g., Clewell, 1981, Microbiol. Rev. 45: 409-436). However, any method known in the art for introducing DNA into a host cell can be used.

[0156] The recombinant host cell may also be a eukaryote, such as a mammalian, insect, plant, or fungal cell.

[0157] “Fungi” as used herein includes the phyla Ascomycota, Basidiomycota, Chytridiomycota, and Zygomycota as well as the Oomycota and all mitosporic fungi (as defined by Hawksworth et al., In, Ainsworth and Bisby's Dictionary of The Fungi, 8th edition, 1995, CAB International, University Press, Cambridge, UK).

[0158] In one embodiment, the host cell is a yeast cell. “Yeast” as used herein includes ascosporogenous yeast (Endomycetales), basidiosporogenous yeast, and yeast belonging to the Fungi Imperfecti (Blastomycetes). Since the classification of yeast may change in the future, for the purposes described herein, yeast shall be defined as described in Biology and Activities of Yeast (Skinner, F. A., Passmore, S. M., and Davenport, R. R., eds, Soc. App. Bacteriol. Symposium Series No. 9, 1980).

[0159] The yeast host cell may be a Candida, Hansenula, Issatchenkia, Kluyveromyces, Pichia, Saccharomyces, Schizosaccharomyces, or Yarrowia cell, such as a Candida sonorensis, Candida methanosorbosa, Candida ethanolica, Issatchenkia orientalis, Kluyveromyces lactis, Kluyveromyces marxianus, Pichia fermentans, Pichia galeiformis, Pichia membranifaciens, Pichia deserticola, Saccharomyces carlsbergensis, Saccharomyces cerevisiae, Saccharomyces diastaticus, Saccharomyces bulderi, Saccharomyces douglasii, Saccharomyces kluyveri, Saccharomyces norbensis, Saccharomyces oviformis, or Yarrowia lipolytica cell.

[0160] In certain embodiments, the modified yeast cells provided herein are generated by incorporating one or more genetic modifications into a Crabtree-negative host yeast cell. In certain of these embodiments the host yeast cell belongs to the genus Issatchenkia, Candida, or Saccharomyces, and in certain of these embodiments the host cell belongs to the I. orientalis/P. fermentans or Saccharomyces clade. In certain of embodiments, the host cell is I. orientalis or C. lambica, or S. bulderi. In certain embodiments, the yeast cells are I. orientalis CNB1 yeast cells (as described in WO2012/074818, the content of which is incorporated herein by reference). CNB1 cells include CNB1 cells described in WO2012/074818 and any cell derived from the CNB1 cells described therein.

[0161] The yeast host cell may be derived from a cell or engineered such that the cell has been genetically modified to produce high lactic acid titers, exhibit increased tolerance to acidic pH, exhibit increased tolerance to ethanol or propanol, and/or display increased ability to ferment pentose sugars (yet, in some embodiments, the yeast cell is unable to ferment pentose sugars). Exemplary genetically modified yeast cells are described in WO00/71738, WO03/049525, WO03/102201, WO03/102152, WO02/42471, WO2007/032792, WO2007/106524, WO2007/117282, the content of which is hereby incorporated by reference with respect to said cells. The modification of any yeast cell described in the foregoing applications is contemplated with an active 3-HP pathway as described herein.

[0162] The yeast host cell may be a crabtree-positive phenotype or a crabtree-negative phenotype. Crabtree-negative organisms are characterized by the ability to be induced into an increased fermentative state. Both naturally occurring organisms and recombinant organisms can be characterized as Crabtree-negative. The Crabtree effect is defined as oxygen consumption inhibition in a microorganism when the microorganism is cultured under aerobic conditions in the presence of a high concentration of glucose (e.g. >5 mM glucose). Crabtree-positive organisms continue to ferment (rather than respire) irrespective of oxygen availability in the presence of glucose, while Crabtree-negative organisms do not exhibit glucose-mediated inhibition of oxygen consumption. This characteristic is useful for organic product synthesis, since it permits cells to be grown at high substrate concentrations but to retain the beneficial energetic effects of oxidative phosphorylation. In one aspect, the yeast has a crabtree-negative phenotype.

[0163] In certain embodiments, the yeast cells provided herein are “3-HP resistant yeast cells,” as described in US2012/0135481. In certain of these embodiments, the yeast cells may exhibit 3-HP resistance in their native form. In other embodiments, the cells may have undergone mutation and/or selection (e.g., chemostat selection or repeated serial subculturing) before, during, or after introduction of genetic modifications related to an active 3-HP pathway, such that the mutated and/or selected cells possess a higher degree of resistant to 3-HP than wild-type cells of the same species. For example, in some embodiments, the cells have undergone mutation and/or selection in the presence of 3-HP or lactic acid before or after being genetically modified with one or more heterologous 3-HP pathway genes. In certain embodiments, mutation and/or selection may be carried out on cells that exhibit 3-HP resistance in their native form. Cells that have undergone mutation and/or selection may be tested for sugar consumption and other characteristics in the presence of varying levels of 3-HP in order to determine their potential as industrial hosts for 3-HP production. In addition to 3-HP resistance, the yeast cells provided herein may have undergone mutation and/or selection for resistance to one or more additional organic acids (e.g., lactic acid) or to other fermentation products, byproducts, or media components. Selection, such as selection for resistance to 3-HP or to other compounds, may be accomplished using methods well known in the art (e.g., as described in US2012/0135481).

[0164] In one embodiment, the host cell is a filamentous fungal cell. “Filamentous fungi” include all filamentous forms of the subdivision Eumycota and Oomycota (as defined by Hawksworth et al., 1995, supra). The filamentous fungi are generally characterized by a mycelial wall composed of chitin, cellulose, glucan, chitosan, mannan, and other complex polysaccharides. Vegetative growth is by hyphal elongation and carbon catabolism is obligately aerobic. In contrast, vegetative growth by yeasts such as Saccharomyces cerevisiae is by budding of a unicellular thallus and carbon catabolism may be fermentative.

[0165] The filamentous fungal host cell may be an Acremonium, Aspergillus, Aureobasidium, Bjerkandera, Ceriporiopsis, Chrysosporium, Coprinus, Coriolus, Cryptococcus, Filibasidium, Fusarium, Humicola, Magnaporthe, Mucor, Myceliophthora, Neocallimastix, Neurospora, Paecilomyces, Penicillium, Phanerochaete, Phlebia, Piromyces, Pleurotus, Schizophyllum, Talaromyces, Thermoascus, Thielavia, Tolypocladium, Trametes, or Trichoderma cell.

[0166] For example, the filamentous fungal host cell may be an Aspergillus awamori, Aspergillus foetidus, Aspergillus fumigatus, Aspergillus japonicus, Aspergillus nidulans, Aspergillus niger, Aspergillus oryzae, Bjerkandera adusta, Ceriporiopsis aneirina, Ceriporiopsis caregiea, Ceriporiopsis gilvescens, Ceriporiopsis pannocinta, Ceriporiopsis rivulosa, Ceriporiopsis subrufa, Ceriporiopsis subvermispora, Chrysosporium inops, Chrysosporium keratinophilum, Chrysosporium lucknowense, Chrysosporium merdarium, Chrysosporium pannicola, Chrysosporium queenslandicum, Chrysosporium tropicum, Chrysosporium zonatum, Coprinus cinereus, Coriolus hirsutus, Fusarium bactridioides, Fusarium cerealis, Fusarium crookwellense, Fusarium culmorum, Fusarium graminearum, Fusarium graminum, Fusarium heterosporum, Fusarium negundi, Fusarium oxysporum, Fusarium reticulatum, Fusarium roseum, Fusarium sambucinum, Fusarium sarcochroum, Fusarium sporotrichioides, Fusarium sulphureum, Fusarium torulosum, Fusarium trichothecioides, Fusarium venenatum, Humicola insolens, Humicola lanuginosa, Mucor miehei, Myceliophthora thermophila, Neurospora crassa, Penicillium purpurogenum, Phanerochaete chrysosporium, Phlebia radiata, Pleurotus eryngii, Thielavia terrestris, Trametes villosa, Trametes versicolor, Trichoderma harzianum, Trichoderma koningii, Trichoderma longibrachiatum, Trichoderma reesei, or Trichoderma viride cell.

[0167] Fungal cells may be transformed by a process involving protoplast formation, transformation of the protoplasts, and regeneration of the cell wall in a manner known per se. Suitable procedures for transformation of Aspergillus and Trichoderma host cells are described in EP 238023, Yelton et al., 1984, Proc. Natl. Acad. Sci. USA 81: 1470-1474, and Christensen et al., 1988, Bio/Technology 6: 1419-1422. Suitable methods for transforming Fusarium species are described by Malardier et al., 1989, Gene 78: 147-156, and WO 96/00787. Yeast may be transformed using the procedures described by Becker and Guarente, In Abelson, J. N. and Simon, M. I., editors, Guide to Yeast Genetics and Molecular Biology, Methods in Enzymology, Volume 194, pp 182-187, Academic Press, Inc., New York; Ito et al., 1983, J. Bacteriol. 153: 163; and Hinnen et al., 1978, Proc. Natl. Acad. Sci. USA 75: 1920, or as described herein.

[0168] The ideal cell for 3-HP production is capable of growing at low pH levels. The ability to conduct fermentation at a low pH decreases downstream recovery costs, resulting in more economical production. Therefore, in certain embodiments the host cell is capable of growing at low pH levels (e.g., at pH levels less than 7, 6, 5, 4, or 3).

[0169] A suitable host cell may possess one or more favorable characteristics in addition to 3-HP resistance and/or low pH growth capability. For example, potential host cells exhibiting 3-HP resistance may be further selected based on glycolytic rates, specific growth rates, thermotolerance, tolerance to biomass hydrolysate inhibitors, overall process robustness, and so on. These criteria may be evaluated prior to any genetic modification relating to a 3-HP pathway, or they may be evaluated after one or more such modifications have taken place.

[0170] In some aspects, the recombinant cell comprises one or more (e.g., two, several) heterologous polynucleotides of an active 3-HP pathway described herein (e.g., a heterologous polynucleotide encoding a PPC; a heterologous polynucleotide encoding a PYC; a heterologous polynucleotide encoding an AAT; a heterologous polynucleotide encoding an ADC; a heterologous polynucleotide encoding a BAAT or gabT; and/or a heterologous polynucleotide encoding a 3-HPDH), wherein the recombinant cell secretes (and/or is capable of secreting) an increased level of 3-HP compared to the host cell without the one or more heterologous polynucleotides of the active 3-HP pathway when cultivated under the same conditions. In some aspects, the recombinant cell secretes and/or is capable of secreting an increased level of 3-HP of at least 5%, e.g., at least 10%, at least 15%, at least 20%, at least 25%, at least 50%, at least 100%, at least 150%, at least 200%, at least 300%, or at 500% compared to the host cell without the one or more heterologous polynucleotides of the active 3-HP pathway, when cultivated under the same conditions. Examples of suitable cultivation conditions are described below and will be readily apparent to one of skill in the art based on the teachings herein.

[0171] In any of these aspects, the recombinant cell produces (and/or is capable of producing) 3-HP at a yield of at least 10%, e.g., at least 20%, at least 30%, at least 40%, at least 50%, at least 60%, at least 70%, at least 80%, or at least 90%, of theoretical.

[0172] In any of these aspects, the recombinant cell has a 3-HP volumetric productivity greater than about 0.1 g/L per hour, e.g., greater than about 0.2 g/L per hour, 0.5 g/L per hour, 0.6 g/L per hour, 0.7 g/L per hour, 0.8 g/L per hour, 0.9 g/L per hour, 1.0 g/L per hour, 1.1 g/L per hour, 1.2 g/L per hour, 1.3 g/L per hour, 1.5 g/L per hour, 1.75 g/L per hour, 2.0 g/L per hour, 2.25 g/L per hour, 2.5 g/L per hour, 2.75 g/L per hour, 3.0 g/L per hour, 3.25 g/L per hour, 3.5 g/L per hour, 3.75 g/L per hour, or 4.0 g/L per hour; or between about 0.1 g/L per hour and about 2.0 g/L per hour, e.g., between about 0.3 g/L per hour and about 1.7 g/L per hour, about 0.5 g/L per hour and about 1.5 g/L per hour, about 0.7 g/L per hour and about 1.3 g/L per hour, about 0.8 g/L per hour and about 1.2 g/L per hour, or about 0.9 g/L per hour and about 1.1 g/L per hour; or between about 0.1 g/L per hour and about 4.0 g/L per hour, e.g., between about 0.5 g/L per hour and about 3.75 g/L per hour, about 1.0 g/L per hour and about 3.5 g/L per hour, about 2.0 g/L per hour and about 3.25 g/L per hour.

[0173] In any of these aspects, the recombinant cell produces (and/or is capable of producing) a greater amount of 3-HP compared to the cell without the heterologous polynucleotide encoding the 3-HPDH when cultivated under the same conditions. In some embodiments, the cell produces (and/or is capable of producing) at least 10% more (e.g., at least 15%, at least 20%, at least 25%, at least 30%, at least 35%, at least 40%, at least 45%, at least 50%, at least 75%, at least 100%, at least 200%, at least 300%, or at 500% more) 3-HP compared to the cell without the heterologous polynucleotide encoding the 3-HPDH when cultivated under the same conditions.

[0174] In any of these aspects, the recombinant cell produces (and/or is capable of producing) a greater amount of 3-HP (e.g., at least 10% more, at least 15%, at least 20%, at least 25%, at least 30%, at least 35%, at least 40%, at least 45%, at least 50%, at least 75%, at least 100%, at least 200%, at least 300%, or at 500% more) compared to a second recombinant cell, when cultivated under identical conditions; wherein the second cell is identical to the recombinant cell with the proviso that the second cell encodes the 3-HPDH of SEQ ID NO: 26 in place of the recombinant cell 3-HPDH.

[0175] In some embodiments, the recombinant cells have an increased level of 3-HPDH activity compared to the host cells without the heterologous polynucleotide encoding the 3-HPDH, when cultivated under the same conditions. In other aspects, the cells have an increased level of 3-HPDH activity of at least 5%, e.g., at least 10%, at least 15%, at least 20%, at least 25%, at least 50%, at least 100%, at least 150%, at least 200%, at least 300%, or at 500% compared to the host cells without the heterologous polynucleotide encoding 3-HPDH, when cultivated under the same conditions.

[0176] The recombinant cells may be cultivated in a nutrient medium suitable for production of one or more polypeptides of the active 3-HP pathway using methods well known in the art. For example, the cell may be cultivated by shake flask cultivation, and small-scale or large-scale fermentation (including continuous, batch, fed-batch, or solid state fermentations) in laboratory or industrial fermentors performed in a suitable medium and under conditions allowing the desired polypeptide to be expressed and/or isolated. The cultivation takes place in a suitable nutrient medium comprising carbon and nitrogen sources and inorganic salts, as described herein, using procedures known in the art. Suitable media are available from commercial suppliers, may be prepared according to published compositions (e.g., in catalogues of the American Type Culture Collection), or may be prepared from commercially available ingredients.

[0177] The recombinant cells described herein also can be subjected to adaptive evolution to further augment 3-HP biosynthesis, including under conditions approaching theoretical maximum growth.

[0178] The recombinant cells described herein can further contain lipase or esterase activity, for example due to expression of a heterologous polynucleotide encoding a lipase or esterase (EC 3.1.1.-). Such cells can be used to produce an ester of 3-HP, such as methyl 3-hydroxypropionate, ethyl 3-hydroxypropionate, propyl 3-hydroxypropionate, butyl 3-hydroxypropionate, or 2-ethylhexyl 3-hydroxypropionate. The cells can further contain esterase activity, for example due to expression of a heterologous polynucleotide encoding an esterase. Such cells can be used to produce polymerized 3-HP. The cells can further contain alcohol dehydrogenase activity (EC 1.1.1.1), aldehyde dehydrogenase activity (EC 1.2.1.-), or both, for example due to expression of a heterologous polynucleotide encoding an alcohol dehydrogenase, aldehyde dehydrogenase, or both. Such cells can be used to produce 1,3-propanediol.

[0179] The recombinant cells described herein may utilize expression vectors comprising the coding sequence of one or more (e.g., two, several) heterologous 3-HP pathway genes linked to one or more control sequences that direct expression in a suitable cell under conditions compatible with the control sequence(s). Such expression vectors may be used in any of the cells and methods described herein. The polynucleotides described herein may be manipulated in a variety of ways to provide for expression of a desired polypeptide. Manipulation of the polynucleotide prior to its insertion into a vector may be desirable or necessary depending on the expression vector. The techniques for modifying polynucleotides utilizing recombinant DNA methods are well known in the art.

[0180] A construct or vector (or multiple constructs or vectors) comprising the one or more (e.g., two, several) heterologous 3-HP pathway genes may be introduced into a cell so that the construct or vector is maintained as a chromosomal integrant or as a self-replicating extra-chromosomal vector as described earlier.

[0181] The various nucleotide and control sequences may be joined together to produce a recombinant expression vector that may include one or more (e.g., two, several) convenient restriction sites to allow for insertion or substitution of the polynucleotide at such sites. Alternatively, the polynucleotide(s) may be expressed by inserting the polynucleotide(s) or a nucleic acid construct comprising the sequence into an appropriate vector for expression. In creating the expression vector, the coding sequence is located in the vector so that the coding sequence is operably linked with the appropriate control sequences for expression.

[0182] The recombinant expression vector may be any vector (e.g., a plasmid or virus) that can be conveniently subjected to recombinant DNA procedures and can bring about expression of the polynucleotide. The choice of the vector will typically depend on the compatibility of the vector with the host cell into which the vector is to be introduced. The vector may be a linear or closed circular plasmid.

[0183] In one aspect, the recombinant cell comprises a heterologous polynucleotide is contained in an independent vector. In one aspect, the recombinant cell comprises a plurality of heterologous polynucleotides each contained in an independent vector. In one aspect, the recombinant cell comprises at least two heterologous polynucleotides contained in a single vector. In one aspect, the recombinant cell comprises at least three of the heterologous polynucleotides contained on a single vector. In one aspect, the recombinant cell comprises at least four of the heterologous polynucleotides contained on a single vector. In one aspect, all the heterologous polynucleotides of the recombinant cell are contained on a single vector. Polynucleotides encoding heteromeric subunits of a protein complex may be contained in a single heterologous polynucleotide on a single vector or alternatively contained in separate heterologous polynucleotides on separate vectors.

[0184] The vector may be an autonomously replicating vector, i.e., a vector that exists as an extrachromosomal entity, the replication of which is independent of chromosomal replication, e.g., a plasmid, an extrachromosomal element, a minichromosome, or an artificial chromosome. The vector may contain any means for assuring self-replication. Alternatively, the vector may be one that, when introduced into the host cell, is integrated into the genome and replicated together with the chromosome(s) into which it has been integrated. Furthermore, a single vector or plasmid or two or more vectors or plasmids that together contain the total DNA to be introduced into the genome of the cell, or a transposon, may be used.

[0185] The expression vector may contain any suitable promoter sequence that is recognized by a cell for expression of a 3-HPDH gene or any 3-HP pathway gene described herein. The promoter sequence contains transcriptional control sequences that mediate the expression of the polypeptide. The promoter may be any polynucleotide that shows transcriptional activity in the cell of choice including mutant, truncated, and hybrid promoters, and may be obtained from genes encoding extracellular or intracellular polypeptides either homologous or heterologous to the cell.

[0186] Each heterologous polynucleotide described herein may be operably linked to a promoter that is foreign to the polynucleotide. For example, in one aspect, the heterologous polynucleotide encoding the 3-HPDH is operably linked to a promoter foreign to the polynucleotide. In another aspect, the heterologous polynucleotide encoding a polypeptide of a 3-HP pathway described herein (e.g., a PPC, PYC, AAT, ADC, BAAT, gabT, or 3-HPDH) is operably linked to promoter foreign to the polynucleotide. The promoters may be identical to or share a high degree of sequence identity (e.g., at least about 80%, at least about 85%, at least about 90%, at least about 95%, or at least about 99%) with a selected native promoter.

[0187] Examples of suitable promoters for directing transcription of the nucleic acid constructs of the present invention in a bacterial host cell are the promoters obtained from the Bacillus amyloliquefaciens alpha-amylase gene (amyQ), Bacillus licheniformis alpha-amylase gene (amyL), Bacillus licheniformis penicillinase gene (penP), Bacillus stearothermophilus maltogenic amylase gene (amyM), Bacillus subtilis levansucrase gene (sacB), Bacillus subtilis xylA and xylB genes, Bacillus thuringiensis cryIIIA gene (Agaisse and Lereclus, 1994, Molecular Microbiology 13: 97-107), E. coli lac operon, E. coli trc promoter (Egon et al., 1988, Gene 69: 301-315), Streptomyces coelicolor agarase gene (dagA), and prokaryotic beta-lactamase gene (Villa-Kamaroff et al., 1978, Proc. Natl. Acad. Sci. USA 75: 3727-3731), as well as the tac promoter (DeBoer et al., 1983, Proc. Natl. Acad. Sci. USA 80: 21-25). Further promoters are described in “Useful proteins from recombinant bacteria” in Gilbert et al., 1980, Scientific American 242: 74-94; and in Sambrook et al., 1989, supra. Examples of tandem promoters are disclosed in WO 99/43835.

[0188] Examples of suitable promoters for directing the transcription of the nucleic acid constructs in a yeast cells, include, but are not limited to, the promoters obtained from the genes for enolase, (e.g., S. cerevisiae enolase or I. orientalis enolase (ENO1)), galactokinase (e.g., S. cerevisiae galactokinase or I. orientalis galactokinase (GAL1)), alcohol dehydrogenase/glyceraldehyde-3-phosphate dehydrogenase (e.g., S. cerevisiae alcohol dehydrogenase/glyceraldehyde-3-phosphate dehydrogenase or I. orientalis alcohol dehydrogenase/glyceraldehyde-3-phosphate dehydrogenase (ADH1, ADH2/GAP)), triose phosphate isomerase (e.g., S. cerevisiae triose phosphate isomerase or I. orientalis triose phosphate isomerase (TPI)), metallothionein (e.g., S. cerevisiae metallothionein or I. orientalis metallothionein (CUP1)), 3-phosphoglycerate kinase (e.g., S. cerevisiae 3-phosphoglycerate kinase or I. orientalis 3-phosphoglycerate kinase (PGK)), PDC1, xylose reductase (XR), xylitol dehydrogenase (XDH), L-(+)-lactate-cytochrome c oxidoreductase (CYB2), translation elongation factor-1 (TEF1), translation elongation factor-2 (TEF2), glyceraldehyde-3-phosphate dehydrogenase (GAPDH), and orotidine 5′-phosphate decarboxylase (URA3) genes. Other useful promoters for yeast host cells are described by Romanos et al., 1992, Yeast 8: 423-488.

[0189] Examples of suitable promoters for directing transcription of the nucleic acid constructs of the present invention in a filamentous fungal host cell are promoters obtained from the genes for Aspergillus nidulans acetamidase, Aspergillus niger neutral alpha-amylase, Aspergillus niger acid stable alpha-amylase, Aspergillus niger or Aspergillus awamori glucoamylase (glaA), Aspergillus oryzae TAKA amylase, Aspergillus oryzae alkaline protease, Aspergillus oryzae triose phosphate isomerase, Fusarium oxysporum trypsin-like protease (WO 96/00787), Fusarium venenatum amyloglucosidase (WO 00/56900), Fusarium venenatum Dania (WO 00/56900), Fusarium venenatum Quinn (WO 00/56900), Rhizomucor miehei lipase, Rhizomucor miehei aspartic proteinase, Trichoderma reesei beta-glucosidase, Trichoderma reesei cellobiohydrolase I, Trichoderma reesei cellobiohydrolase II, Trichoderma reesei endoglucanase I, Trichoderma reesei endoglucanase II, Trichoderma reesei endoglucanase III, Trichoderma reesei endoglucanase IV, Trichoderma reesei endoglucanase V, Trichoderma reesei xylanase I, Trichoderma reesei xylanase II, Trichoderma reesei beta-xylosidase, as well as the NA2-tpi promoter (a modified promoter from an Aspergillus neutral alpha-amylase gene in which the untranslated leader has been replaced by an untranslated leader from an Aspergillus triose phosphate isomerase gene; non-limiting examples include modified promoters from an Aspergillus niger neutral alpha-amylase gene in which the untranslated leader has been replaced by an untranslated leader from an Aspergillus nidulans or Aspergillus oryzae triose phosphate isomerase gene); and mutant, truncated, and hybrid promoters thereof.

[0190] The control sequence may also be a suitable transcription terminator sequence, which is recognized by a host cell to terminate transcription. The terminator sequence is operably linked to the 3′-terminus of the polynucleotide encoding the polypeptide. Any terminator that is functional in the yeast cell of choice may be used. The terminator may be identical to or share a high degree of sequence identity (e.g., at least about 80%, at least about 85%, at least about 90%, at least about 95%, or at least about 99%) with the selected native terminator. In certain embodiments, 3-HP pathway genes are linked to a terminator that comprises a functional portion of a native GAL10 gene native to the host cell or a sequence that shares at least 80%, at least 85%, at least 90%, or at least 95% sequence identity with a native GAL10 terminator.

[0191] Suitable terminators for bacterial host cells may be obtained from the genes for Bacillus clausii alkaline protease (aprH), Bacillus licheniformis alpha-amylase (amyL), and Escherichia coli ribosomal RNA (rrnB).

[0192] Suitable terminators for yeast host cells may be obtained from the genes for enolase (e.g., S. cerevisiae or I. orientalis enolase cytochrome C (e.g., S. cerevisiae or I. orientalis cytochrome (CYC1)), glyceraldehyde-3-phosphate dehydrogenase (e.g., S. cerevisiae or I. orientalis glyceraldehyde-3-phosphate dehydrogenase (gpd)), PDC1, XR, XDH, transaldolase (TAL), transketolase (TKL), ribose 5-phosphate ketol-isomerase (RKI), CYB2, and the galactose family of genes (especially the GAL10 terminator). Other useful terminators for yeast host cells are described by Romanos et al., 1992, supra.

[0193] Suitable terminators for filamentous fungal host cells may be obtained from the genes for Aspergillus nidulans anthranilate synthase, Aspergillus niger glucoamylase, Aspergillus niger alpha-glucosidase, Aspergillus oryzae TAKA amylase, and Fusarium oxysporum trypsin-like protease.

[0194] The control sequence may also be an mRNA stabilizer region downstream of a promoter and upstream of the coding sequence of a gene which increases expression of the gene.

[0195] Examples of suitable mRNA stabilizer regions are obtained from a Bacillus thuringiensis cryIIIA gene (WO 94/25612) and a Bacillus subtilis SP82 gene (Hue et al., 1995, Journal of Bacteriology 177: 3465-3471).

[0196] The control sequence may also be a suitable leader sequence, when transcribed is a nontranslated region of an mRNA that is important for translation by the host cell. The leader sequence is operably linked to the 5′-terminus of the polynucleotide encoding the polypeptide. Any leader sequence that is functional in the yeast cell of choice may be used.

[0197] Suitable leaders for yeast host cells are obtained from the genes for enolase (e.g., S. cerevisiae or I. orientalis enolase (ENO-1)), 3-phosphoglycerate kinase (e.g., S. cerevisiae or I. orientalis 3-phosphoglycerate kinase), alpha-factor (e.g., S. cerevisiae or I. orientalis alpha-factor), and alcohol dehydrogenase/glyceraldehyde-3-phosphate dehydrogenase (e.g., S. cerevisiae or I. orientalis alcohol dehydrogenase/glyceraldehyde-3-phosphate dehydrogenase (ADH2/GAP)).

[0198] Preferred leaders for filamentous fungal host cells are obtained from the genes for Aspergillus oryzae TAKA amylase and Aspergillus nidulans triose phosphate isomerase.

[0199] The control sequence may also be a polyadenylation sequence; a sequence operably linked to the 3′-terminus of the polynucleotide and, when transcribed, is recognized by the host cell as a signal to add polyadenosine residues to transcribed mRNA. Any polyadenylation sequence that is functional in the host cell of choice may be used. Useful polyadenylation sequences for yeast cells are described by Guo and Sherman, 1995, Mol. Cellular Biol. 15: 5983-5990. Preferred polyadenylation sequences for filamentous fungal host cells are obtained from the genes for Aspergillus nidulans anthranilate synthase, Aspergillus niger glucoamylase, Aspergillus niger alpha-glucosidase, Aspergillus oryzae TAKA amylase, and Fusarium oxysporum trypsin-like protease.

[0200] It may also be desirable to add regulatory sequences that allow the regulation of the expression of the polypeptide relative to the growth of the host cell. Examples of regulatory systems are those that cause the expression of the gene to be turned on or off in response to a chemical or physical stimulus, including the presence of a regulatory compound. Regulatory systems in prokaryotic systems include the lac, tac, and trp operator systems. In yeast, the ADH2 system or GAL1 system may be used. In filamentous fungi, the Aspergillus niger glucoamylase promoter, Aspergillus oryzae TAKA alpha-amylase promoter, and Aspergillus oryzae glucoamylase promoter may be used. Other examples of regulatory sequences are those that allow for gene amplification. In eukaryotic systems, these regulatory sequences include the dihydrofolate reductase gene that is amplified in the presence of methotrexate, and the metallothionein genes that are amplified with heavy metals. In these cases, the polynucleotide encoding the polypeptide would be operably linked with the regulatory sequence.

[0201] The vectors may contain one or more (e.g., two, several) selectable markers that permit easy selection of transformed, transfected, transduced, or the like cells. A selectable marker is a gene the product of which provides for biocide or viral resistance, resistance to heavy metals, prototrophy to auxotrophs, and the like.

[0202] Examples of bacterial selectable markers are Bacillus licheniformis or Bacillus subtilis dal genes, or markers that confer antibiotic resistance such as ampicillin, chloramphenicol, kanamycin, neomycin, spectinomycin or tetracycline resistance. Suitable markers for yeast host cells include, but are not limited to, ADE2, HIS3, LEU2, LYS2, MET3, TRP1, and URA3. Selectable markers for use in a filamentous fungal host cell include, but are not limited to, amdS (acetamidase), argB (ornithine carbamoyltransferase), bar (phosphinothricin acetyltransferase), hph (hygromycin phosphotransferase), niaD (nitrate reductase), pyrG (orotidine-5′-phosphate decarboxylase), sC (sulfate adenyltransferase), and trpC (anthranilate synthase), as well as equivalents thereof. Preferred for use in an Aspergillus cell are Aspergillus nidulans or Aspergillus oryzae amdS and pyrG genes and a Streptomyces hygroscopicus bar gene.

[0203] The vectors may contain one or more (e.g., two, several) elements that permit integration of the vector into the host cell's genome or autonomous replication of the vector in the cell independent of the genome.

[0204] For integration into the host cell genome, the vector may rely on the polynucleotide's sequence encoding the polypeptide or any other element of the vector for integration into the genome by homologous or non-homologous recombination. Alternatively, the vector may contain additional polynucleotides for directing integration by homologous recombination into the genome of the host cell at a precise location(s) in the chromosome(s). To increase the likelihood of integration at a precise location, the integrational elements should contain a sufficient number of nucleic acids, such as 100 to 10,000 base pairs, 400 to 10,000 base pairs, and 800 to 10,000 base pairs, which have a high degree of sequence identity to the corresponding target sequence to enhance the probability of homologous recombination. The integrational elements may be any sequence that is homologous with the target sequence in the genome of the host cell. Furthermore, the integrational elements may be non-encoding or encoding polynucleotides. On the other hand, the vector may be integrated into the genome of the host cell by non-homologous recombination. Potential integration loci include those described in the art (e.g., See US2012/0135481).

[0205] For autonomous replication, the vector may further comprise an origin of replication enabling the vector to replicate autonomously in the yeast cell. The origin of replication may be any plasmid replicator mediating autonomous replication that functions in a cell. The term “origin of replication” or “plasmid replicator” means a polynucleotide that enables a plasmid or vector to replicate in vivo.

[0206] Examples of bacterial origins of replication are the origins of replication of plasmids pBR322, pUC19, pACYC177, and pACYC184 permitting replication in E. coli, and pUB110, pE194, pTA1060, and pAMβ1 permitting replication in Bacillus.

[0207] Examples of origins of replication for use in a yeast host cell are the 2 micron origin of replication, ARS1, ARS4, the combination of ARS1 and CEN3, and the combination of ARS4 and CEN6.

[0208] Examples of origins of replication useful in a filamentous fungal cell are AMA1 and ANSI (Gems et al., 1991, Gene 98: 61-67; Cullen et al., 1987, Nucleic Acids Res. 15: 9163-9175; WO 00/24883). Isolation of the AMA1 gene and construction of plasmids or vectors comprising the gene can be accomplished according to the methods disclosed in WO 00/24883.

[0209] More than one copy of a polynucleotide described herein may be inserted into a host cell to increase production of a polypeptide. An increase in the copy number of the polynucleotide can be obtained by integrating at least one additional copy of the sequence into the yeast cell genome or by including an amplifiable selectable marker gene with the polynucleotide where cells containing amplified copies of the selectable marker gene, and thereby additional copies of the polynucleotide, can be selected for by cultivating the cells in the presence of the appropriate selectable agent.

[0210] The procedures used to ligate the elements described above to construct the recombinant expression vectors described herein are well known to one skilled in the art (see, e.g., Sambrook et al., 1989, supra).

[0211] Additional procedures and techniques known in the art for the preparation of recombinant cells comprising one or more 3-HP pathway genes, are described in, e.g., WO 2012/074818, the content of which is hereby incorporated by reference.

### Gene Disruptions

[0212] The recombinant cell may also comprise one or more (e.g., two, several) gene disruptions, e.g., to divert sugar metabolism from undesired products to 3-HP. In some aspects, the recombinant host cells produce a greater amount of 3-HP compared to the cell without the one or more disruptions when cultivated under identical conditions. In some aspects, one or more of the disrupted endogenous genes are inactivated.

[0213] In certain embodiments, the recombinant cells provided herein comprise a disruption of one or more endogenous genes encoding an enzyme involved in ethanol fermentation, including for example pyruvate decarboxylase (PDC, converts pyruvate to acetaldehyde) and/or alcohol dehydrogenase (ADH, converts acetaldehyde to ethanol) genes. These modifications decrease the ability of the cell to produce ethanol, thereby maximizing 3-HP production. However, in certain embodiments the recombinant cells provided herein may be engineered to co-produce 3-HP and ethanol. In those embodiments, endogenous genes encoding an enzyme involved in ethanol fermentation are preferably not disrupted, and in certain embodiments the cells may comprise one or more heterologous genes that increase ethanol production.

[0214] In some embodiments, the recombinant cells comprise a disruption to an endogenous gene encoding a PDC having at least 75%, e.g., at least 80%, at least 85%, at least 90%, at least 95%, at least 96%, at least 97%, at least 98%, at least 99%, or 100% sequence identity to SEQ ID NO: 154. In some embodiments, the endogenous gene encodes a PDC having an amino acid sequence comprising or consisting of SEQ ID NO: 154. In some embodiments, the coding sequence of the endogenous gene encoding the PDC has at least 75%, e.g., at least 80%, at least 85%, at least 90%, at least 95%, at least 96%, at least 97%, at least 98%, at least 99%, or 100% sequence identity to SEQ ID NO: 153. In some embodiments, the coding sequence of the endogenous gene encoding the PDC comprises or consists of SEQ ID NO: 153. In some embodiments, the endogenous gene encoding the PDC is inactivated.

[0215] In certain embodiments, the recombinant cells provided herein comprise a disruption of one or more endogenous genes encoding enzymes involved in producing alternate fermentative products such as glycerol or other byproducts such as acetate or diols. For example, the cells provided herein may comprise a disruption of one or more of glycerol 3-phosphate dehydrogenase (GPD, catalyzes reaction of dihydroxyacetone phosphate to glycerol 3-phosphate), glycerol 3-phosphatase (GPP, catalyzes conversion of glycerol-3 phosphate to glycerol), glycerol kinase (catalyzes conversion of glycerol 3-phosphate to glycerol), dihydroxyacetone kinase (catalyzes conversion of dihydroxyacetone phosphate to dihydroxyacetone), glycerol dehydrogenase (catalyzes conversion of dihydroxyacetone to glycerol), aldehyde dehydrogenase (ALD, e.g., converts acetaldehyde to acetate or 3-HP to 3-HPA), and butanediol dehydrogenase (catalyzes conversion of butanediol to acetoin and vice versa) genes.

[0216] In some embodiments, the recombinant cells comprise a disruption to an endogenous gene encoding a GPD having at least 75%, e.g., at least 80%, at least 85%, at least 90%, at least 95%, at least 96%, at least 97%, at least 98%, at least 99%, or 100% sequence identity to SEQ ID NO: 156. In some embodiments, the endogenous gene encodes a GPD having an amino acid sequence comprising or consisting of SEQ ID NO: 156. In some embodiments, the coding sequence of the endogenous gene encoding the GPD has at least 75%, e.g., at least 80%, at least 85%, at least 90%, at least 95%, at least 96%, at least 97%, at least 98%, at least 99%, or 100% sequence identity to SEQ ID NO: 155. In some embodiments, the coding sequence of the endogenous gene encoding the GPD comprises or consists of SEQ ID NO: 155. In some embodiments, the endogenous gene encoding the GPD is inactivated.

[0217] In certain embodiments, the recombinant cells provided herein comprise a disruption of one or more endogenous genes encoding enzymes that catalyze a reverse reaction in a 3-HP pathway, including for example PEP carboxykinase (PCK), enzymes with OAA decarboxylase activity, or CYB2A or CYB2B (catalyzes the conversion of lactate to pyruvate). PCK catalyzes the conversion of PEP to OAA and vice versa, but exhibits a preference for the OAA to PEP reaction. To reduce the conversion of OAA to PEP, one or more copies of a native PCK gene may be disrupted. In certain embodiments, cells in which one or more native PCK genes have been disrupted may express one or more heterologous PCK genes that have been mutated to encode a polypeptide favoring the conversion of PEP to OAA. OAA decarboxylase catalyzes the conversion of OAA to pyruvate. Enzymes with OAA decarboxylase activity have been identified, such as that coded by the Entner-Doudoroff aldolase (eda) gene in E. coli and malic enzyme (MAE) in yeast and fungi. To reduce OAA decarboxylase activity, one or more copies of a native gene encoding an enzyme with OAA decarboxylase activity may be disrupted. In certain embodiments, cells in which one or more native OAA decarboxylation genes have been disrupted may express one or more heterologous OAA decarboxylation genes that have been mutated to encode a polypeptide that catalyzes the conversion of pyruvate to OAA.

[0218] In certain embodiments, the recombinant cells provided herein comprise a disruption to one or more genes selected from dse2, scw11, eaf3, sed1, and sam2. (See, e.g., Suzuki et al, J. Biosci. Bioeng. 2013, 115, 467-474; and Dato et al., Microbial Cell Factories, 2014, 13, 147).

[0219] In certain embodiments, the recombinant cells provided herein comprise a disruption of one or more endogenous genes encoding an enzyme involved in an undesirable reaction with a 3-HP pathway product or intermediate. Examples of such genes include those encoding an enzyme that converts 3-HP to an aldehyde of 3-HP, which are known to be toxic to certain cells.

[0220] In certain embodiments, the recombinant cells provided herein comprise a disruption of one or more endogenous genes encoding an enzyme that has a neutral effect on a 3-HP pathway, including for example GALE (negative regulator of the GAL system that converts galactose to glucose). Disruption of neutral genes allows for insertion of one or more heterologous genes without affecting native pathways.

[0221] Modeling can also be used to design gene disruptions that additionally optimize utilization of the pathway (see, for example, U.S. 2002/0012939, U.S. 2003/0224363, U.S. 2004/0029149, U.S. 2004/0072723, U.S. 2003/0059792, U.S. 2002/0168654, U.S. 2004/0009466, and U.S. Pat. No. 7,127,379). Modeling analysis allows reliable predictions of the effects on cell growth of shifting the metabolism towards more efficient production of 3-HP. One exemplary computational method for identifying and designing metabolic alterations favoring biosynthesis of a desired product is the OptKnock computational framework, Burgard et al., 2003, Biotechnol. Bioeng. 84: 647-657.

[0222] The recombinant cells comprising a gene disruption may be constructed using methods well known in the art, including those methods described herein. A portion of the gene can be disrupted such as the coding region or a control sequence required for expression of the coding region. Such a control sequence of the gene may be a promoter sequence or a functional part thereof, i.e., a part that is sufficient for affecting expression of the gene. For example, a promoter sequence may be inactivated resulting in no expression or a weaker promoter may be substituted for the native promoter sequence to reduce expression of the coding sequence. Other control sequences for possible modification include, but are not limited to, a leader, propeptide sequence, signal sequence, transcription terminator, and transcriptional activator.

[0223] The recombinant cells comprising a gene disruption may be constructed by gene deletion techniques to eliminate or reduce expression of the gene. Gene deletion techniques enable the partial or complete removal of the gene thereby eliminating their expression. In such methods, deletion of the gene is accomplished by homologous recombination using a plasmid that has been constructed to contiguously contain the 5′ and 3′ regions flanking the gene.

[0224] The recombinant cells comprising a gene disruption may also be constructed by introducing, substituting, and/or removing one or more (e.g., two, several) nucleotides in the gene or a control sequence thereof required for the transcription or translation thereof. For example, nucleotides may be inserted or removed for the introduction of a stop codon, the removal of the start codon, or a frame-shift of the open reading frame. Such a modification may be accomplished by site-directed mutagenesis or PCR generated mutagenesis in accordance with methods known in the art. See, for example, Botstein and Shortle, 1985, Science 229: 4719; Lo et al., 1985, Proc. Natl. Acad. Sci. U.S.A. 81: 2285; Higuchi et al., 1988, Nucleic Acids Res 16: 7351; Shimada, 1996, Meth. Mol. Biol. 57: 157; Ho et al., 1989, Gene 77: 61; Horton et al., 1989, Gene 77: 61; and Sarkar and Sommer, 1990, Bio Techniques 8: 404.

[0225] The recombinant cells comprising a gene disruption may also be constructed by inserting into the gene a disruptive nucleic acid construct comprising a nucleic acid fragment homologous to the gene that will create a duplication of the region of homology and incorporate construct DNA between the duplicated regions. Such a gene disruption can eliminate gene expression if the inserted construct separates the promoter of the gene from the coding region or interrupts the coding sequence such that a non-functional gene product results. A disrupting construct may be simply a selectable marker gene accompanied by 5′ and 3′ regions homologous to the gene. The selectable marker enables identification of transformants containing the disrupted gene.

[0226] The recombinant cells comprising a gene disruption may also be constructed by the process of gene conversion (see, for example, Iglesias and Trautner, 1983, Molecular General Genetics 189: 73-76). For example, in the gene conversion method, a nucleotide sequence corresponding to the gene is mutagenized in vitro to produce a defective nucleotide sequence, which is then transformed into the recombinant strain to produce a defective gene. By homologous recombination, the defective nucleotide sequence replaces the endogenous gene. It may be desirable that the defective nucleotide sequence also comprises a marker for selection of transformants containing the defective gene.

[0227] The recombinant cells comprising a gene disruption may be further constructed by random or specific mutagenesis using methods well known in the art, including, but not limited to, chemical mutagenesis (see, for example, Hopwood, The Isolation of Mutants in Methods in Microbiology (J. R. Norris and D. W. Ribbons, eds.) pp. 363-433, Academic Press, New York, 1970). Modification of the gene may be performed by subjecting the parent strain to mutagenesis and screening for mutant strains in which expression of the gene has been reduced or inactivated. The mutagenesis, which may be specific or random, may be performed, for example, by use of a suitable physical or chemical mutagenizing agent, use of a suitable oligonucleotide, or subjecting the DNA sequence to PCR generated mutagenesis. Furthermore, the mutagenesis may be performed by use of any combination of these mutagenizing methods.

[0228] Examples of a physical or chemical mutagenizing agent suitable for the present purpose include ultraviolet (UV) irradiation, hydroxylamine, N-methyl-N′-nitro-N-nitrosoguanidine (MNNG), N-methyl-N′-nitrosogaunidine (NTG) O-methyl hydroxylamine, nitrous acid, ethyl methane sulphonate (EMS), sodium bisulphite, formic acid, and nucleotide analogues. When such agents are used, the mutagenesis is typically performed by incubating the parent strain to be mutagenized in the presence of the mutagenizing agent of choice under suitable conditions, and selecting for mutants exhibiting reduced or no expression of the gene.

[0229] A nucleotide sequence homologous or complementary to a gene described herein may be used from other microbial sources to disrupt the corresponding gene in a recombinant strain of choice.

[0230] In one aspect, the modification of a gene in the recombinant cell is unmarked with a selectable marker. Removal of the selectable marker gene may be accomplished by culturing the mutants on a counter-selection medium. Where the selectable marker gene contains repeats flanking its 5′ and 3′ ends, the repeats will facilitate the looping out of the selectable marker gene by homologous recombination when the mutant strain is submitted to counter-selection. The selectable marker gene may also be removed by homologous recombination by introducing into the mutant strain a nucleic acid fragment comprising 5′ and 3′ regions of the defective gene, but lacking the selectable marker gene, followed by selecting on the counter-selection medium. By homologous recombination, the defective gene containing the selectable marker gene is replaced with the nucleic acid fragment lacking the selectable marker gene. Other methods known in the art may also be used.

### Methods of Producing 3-HP and Related Compounds

[0231] The recombinant cells described herein may be used for the production of 3-HP. In one aspect is a method of producing 3-HP, comprising: (a) cultivating any one of the recombinant cells described herein (e.g., a recombinant host cell comprising an active 3-HP pathway and a heterologous polynucleotide encoding a 3-HPDH) in a medium under suitable conditions to produce the 3-HP; and (b) recovering the 3-HP.

[0232] The recombinant cells comprising an active 3-HP pathway may be cultivated in a nutrient medium suitable for 3-HP production using methods well known in the art. For example, the cells may be cultivated by shake flask cultivation, and small-scale or large-scale fermentation (including continuous, batch, fed-batch, or solid state fermentations) in laboratory or industrial fermentors performed in a suitable fermentation medium and under conditions allowing 3-HP production.

[0233] The recombinant cells may produce 3-HP in a fermentable medium comprising any one or more (e.g., two, several) sugars, such as glucose, fructose, sucrose, cellobiose, xylose, xylulose, arabinose, mannose, galactose, and/or soluble oligosaccharides. The carbon source may be a twelve carbon sugar such as sucrose, a hexose sugar such as glucose or fructose, glycan or other polymer of glucose, glucose oligomers such as maltose, maltotriose and isomaltotriose, panose, and fructose oligomers. If the cell is modified to impart an ability to ferment pentose sugars, the fermentation medium may include a pentose sugar such as xylose, xylan or other oligomer of xylose, and/or arabinose. Such pentose sugars are suitably hydrolysates of a hemicellulose-containing biomass. In some embodiments, the cell is unable to ferment pentose sugars and/or the fermentable medium comprises less than 1% pentose sugars. In some instances, the fermentable medium is derived from a natural source, such as sugar cane, starch, or cellulose, and may be the result of pretreating the source by enzymatic hydrolysis (saccharification). In some aspects, the fermentable medium comprises sugar cane juice. Suitable media are available from commercial suppliers, may be prepared according to published compositions (e.g., in catalogues of the American Type Culture Collection), or may be prepared from commercially available ingredients.

[0234] In addition to the appropriate carbon sources from one or more (e.g., two, several) sugar(s), the fermentable medium may contain other nutrients or stimulators known to those skilled in the art, such as macronutrients (e.g., nitrogen sources) and micronutrients (e.g., vitamins, mineral salts, and metallic cofactors). In some aspects, the carbon source can be preferentially supplied with at least one nitrogen source, such as yeast extract, N₂, peptone (e.g., Bacto™ Peptone), or soytone (e.g., Bacto™ Soytone). Non-limiting examples of vitamins include multivitamins, biotin, pantothenate, nicotinic acid, meso-inositol, thiamine, pyridoxine, para-aminobenzoic acid, folic acid, riboflavin, and Vitamins A, B, C, D, and E. Examples of mineral salts and metallic cofactors include, but are not limited to Na, P, K, Mg, S, Ca, Fe, Zn, Mn, Co, and Cu.

[0235] In some embodiments, the recombinant cells of the invention can be cultured in a chemically defined medium. In one example, the medium contains around 5 g/L ammonium sulfate, around 3 g/L potassium dihydrogen phosphate, around 0.5 g/L magnesium sulfate, trace elements, and vitamins and around 150 g/L glucose. The pH may be allowed to range freely during cultivation, or may be buffered if necessary to prevent the pH from falling below or rising above predetermined levels. In certain embodiments, the fermentation medium is inoculated with sufficient cells that are the subject of the evaluation to produce an OD₆₀₀ of about 1.0. Unless explicitly noted otherwise, OD₆₀₀ as used herein refers to an optical density measured at a wavelength of 600 nm with a 1 cm pathlength using a model DU600 spectrophotometer (Beckman Coulter).

[0236] Specific conditions used for the methods of 3-HP production may be determined by one skilled in the art in light of the teachings herein. In some aspects of the methods, the cells are cultivated for about 12 hours to about 216 hours, such as about 24 hours to about 144 hours, or about 36 hours to about 96 hours. The temperature is typically between about 26° C. to about 60° C., e.g., about 34° C. to about 50° C.

[0237] Cultivation may be performed under anaerobic, substantially anaerobic (microaerobic), or aerobic conditions, as appropriate. Briefly, anaerobic refers to an environment devoid of oxygen, substantially anaerobic (microaerobic) refers to an environment in which the concentration of oxygen is less than air, and aerobic refers to an environment wherein the oxygen concentration is approximately equal to or greater than that of the air. Substantially anaerobic conditions include, for example, a culture, batch fermentation or continuous fermentation such that the dissolved oxygen concentration in the medium remains less than 10% of saturation. Substantially anaerobic conditions also includes growing or resting cells in liquid medium or on solid agar inside a sealed chamber maintained with an atmosphere of less than 1% oxygen. The percent of oxygen can be maintained by, for example, sparging the culture with a N₂/CO₂ mixture or other suitable non-oxygen gas or gases. In some embodiments, the cultivation is performed under anaerobic conditions or substantially anaerobic conditions.

[0238] In one example, the concentration of cells in the fermentation medium is typically in the range of about 1 to 40, e.g., 2 to 20, or 3 to 10 gram dry cells/liter of fermentation medium during the production phase. If desired, oxygen uptake rate (OUR) can be varied throughout fermentation as a process control (see, e.g., WO03/102200). In some embodiments, the recombinant cells provided herein are cultivated under microaerobic conditions characterized by an oxygen uptake rate from 2 to 45 mmol/L/hr, e.g., 2 to 25, 2 to 20, 2 to 15, 2 to 10, 10 to 45, 15 to 40, 20 to 35, or 25 to 35 mmol/L/hr. In certain embodiments, the recombinant cells provided herein may perform especially well when cultivated under microaerobic conditions characterized by an oxygen uptake rate of from 2 to 25 mmol/L/hr. The medium may be buffered during the production phase such that the pH is maintained in a range of about 3.0 to about 7.0, or from about 4.0 to about 6.0. Suitable buffering agents are basic materials that neutralize the acid as it is formed, and include, for example, calcium hydroxide, calcium carbonate, sodium hydroxide, potassium hydroxide, potassium carbonate, sodium carbonate, ammonium carbonate, ammonia, ammonium hydroxide and the like. In general, those buffering agents that have been used in conventional fermentation processes are also suitable here.

[0239] In those embodiments where a buffered fermentation is utilized, acidic fermentation products may be neutralized to the corresponding salt as they are formed. In these embodiments, recovery of the acid involves regeneration of the free acid. This may be done by removing the cells and acidulating the fermentation broth with a strong acid such as sulfuric acid. This results in the formation of a salt by-product. For example, where a calcium salt is utilized as the neutralizing agent and sulfuric acid is utilized as the acidulating agent, gypsum is produced as a salt by-product. This by-product is separated from the broth, and the acid is recovered using techniques such as liquid-liquid extraction, distillation, absorption, and others (see, e.g., T. B. Vickroy, Vol. 3, Chapter 38 of Comprehensive Biotechnology, (ed. M. Moo-Young), Pergamon, Oxford, 1985; Datta et al., 1995, FEMS Microbiol. Rev. 16: 221-231; U.S. Pat. Nos. 4,275,234, 4,771,001, 5,132,456, 5,420,304, 5,510,526, 5,641,406, and 5,831,122, and WO 93/00440.

[0240] In other embodiments, the pH of the fermentation medium may be permitted to drop during cultivation from a starting pH that is at or above the pKa of 3-HP, typically 4.5 or higher (such as 5.5, 6.0 or 6.5), to at or below the pKa of the acid fermentation product, e.g., less than 4.5 or 4.0, such as in the range of about 1.5 to about 4.5, in the range of from about 2.0 to about 4.0, or in the range from about 2.0 to about 3.5.

[0241] In still other embodiments, fermentation may be carried out to produce a product acid by adjusting the pH of the fermentation broth to at or below the pKa of the product acid prior to or at the start of the fermentation process. The pH may thereafter be maintained at or below the pKa of the product acid throughout the cultivation. In certain embodiments, the pH may be maintained at less than 4.5 or 4.0, such as in a range of about 1.5 to about 4.5, in a range of about 2.0 to about 4.0, or in a range of about 2.0 to about 3.5.

[0242] The methods described herein can employ any suitable fermentation operation mode. For example, batch mode fermentation may be used with a close system where culture media and recombinant host cells, set at the beginning of fermentation, have no additional input except for the reagents certain reagents, e.g., for pH control, foam control or others required for process sustenance. The process described herein can also be employed in Fed-batch or continuous mode, as mentioned supra.

[0243] The methods described herein may be practiced in several bioreactor configurations, such as stirred tank, bubble column, airlift reactor and others known to those skilled in the art. The methods may be performed in free cell culture or in immobilized cell culture as appropriate. Any material support for immobilized cell culture may be used, such as alginates, fibrous bed, or argyle materials such as chrysotile, montmorillonite KSF and montmorillonite K-10.

[0244] In one aspect of the methods, the 3-HP is produced at a titer greater than about 5 g/L, e.g., greater than about 10 g/L, 25 g/L, 50 g/L, 75 g/L, 100 g/L, 125 g/L, 150 g/L, 160 g/L, 170 g/L, 180 g/L, 190 g/L, 200 g/L, 210 g/L, 225 g/L, 250 g/L, 275 g/L, 300 g/L, 325 g/L, 350 g/L, 400 g/L, or 500 g/L; or between about 10 g/L and about 500 g/L, e.g., between about 50 g/L and about 350 g/L, about 100 g/L and about 300 g/L, about 150 g/L and about 250 g/L, about 175 g/L and about 225 g/L, or about 190 g/L and about 210 g/L. In one embodiment, the 3-HP is produced at a titer greater than about 0.01 gram per gram of carbohydrate, e.g., greater than about 0.02, 0.05, 0.75, 0.1, 0.2, 0.3, 0.4, 0.5, 0.6, 0.7, 0.8, 0.9, or 1.0 gram per gram of carbohydrate.

[0245] In one aspect of the methods, the amount of produced 3-HP is at least 5%, e.g., at least 10%, at least 15%, at least 20%, at least 25%, at least 30%, at least 50%, or at least 100% greater compared to cultivating the recombinant cell without the heterologous polynucleotide encoding the 3-HPDH when cultivated under the same conditions.

[0246] In certain embodiments of the methods provided herein, the recombinant cells produce relatively low levels of ethanol. In certain embodiments, ethanol may be produced in a yield of 10% or less, preferably in a yield of 2% or less. In certain of these embodiments, ethanol is not detectably produced. In other embodiments, however, 3-HP and ethanol may be co-produced. In these embodiments, ethanol may be produced at a yield of greater than 10%, greater than 25%, or greater than 50%.

[0247] The 3-HP can be optionally recovered from the fermentation medium using any procedure known in the art including, but not limited to, chromatography (e.g., size exclusion chromatography, adsorption chromatography, ion exchange chromatography), electrophoretic procedures, differential solubility, osmosis, distillation, extraction (e.g., liquid-liquid extraction), pervaporation, extractive filtration, membrane filtration, membrane separation, reverse, or ultrafiltration. In one aspect, the 3-HP is separated from other fermented material and purified by conventional methods of distillation. Accordingly, in one aspect, the method further comprises purifying the recovered 3-HP by distillation.

[0248] The recombinant 3-HP may also be purified by the chemical conversion of impurities (contaminants) to products more easily removed from 3-HP by the procedures described above (e.g., chromatography, electrophoretic procedures, differential solubility, distillation, or extraction) and/or by direct chemical conversion of impurities to 3-HP. For example, in one aspect, the method further comprises purifying recovered 3-HP by converting β-alanine contaminant to 3-HP, using chemical techniques known in the art.

[0249] In some aspects of the methods, the recombinant 3-HP preparation before and/or after being optionally purified is substantially pure. With respect to the methods of producing 3-HP, “substantially pure” intends a recovered preparation that contains no more than 15% impurity, wherein impurity intends compounds other than 3-HP. In one variation, a substantially pure preparation is provided wherein the preparation contains no more than 25% impurity, or no more than 20% impurity, or no more than 10% impurity, or no more than 5% impurity, or no more than 3% impurity, or no more than 1% impurity, or no more than 0.5% impurity.

[0250] 3-HP produced using the methods disclosed herein can be converted into other organic compounds (e.g., as described in U.S. Pat. No. 8,030,045 and WO 03/082795, the content of which is incorporated herein by reference). For example, 3-HP can be hydrogenated to form 1,3 propanediol, a valuable polyester monomer. Propanediol also can be created from 3-HP using polypeptides having oxidoreductase activity in vitro or in vivo (e.g., using one or more additional enzymatic activities as described supra). Hydrogenating an organic acid such as 3-HP can be performed using any method such as those used to hydrogenate succinic acid and/or lactic acid. For example, 3-HP can be hydrogenated using a metal catalyst. Accordingly, in one aspect is a method of producing 1,3-propanediol comprising: (a) cultivating a recombinant cell described herein (e.g., a recombinant host cell comprising an active 3-HP pathway and a heterologous polynucleotide encoding a 3-HPDH), wherein the recombinant cell further comprises oxidoreductase activity in a medium under suitable conditions to produce 1,3-propanediol; and (b) recovering the 1,3-propanediol. In another aspect is a method of producing 1,3-propanediol, comprising: (a) cultivating a recombinant cell described herein (e.g., a recombinant host cell comprising an active 3-HP pathway and a heterologous polynucleotide encoding a 3-HPDH) in a medium under suitable conditions to produce 3-HP; (b) recovering the 3-HP; (c) hydrogenating the 3-HP under suitable conditions to produce 1,3-propanediol; and (d) recovering the 1,3-propanediol.

[0251] 3-HP may also be converted to an ester of 3-HP, such as methyl 3-hydroxypropionate, ethyl 3-hydroxypropionate, propyl 3-hydroxypropionate, butyl 3-hydroxypropionate, or 2-ethylhexyl 3-hydroxypropionate. In one aspect is a method of producing a 3-HP ester comprising: (a) cultivating a recombinant cell described herein (e.g., a recombinant host cell comprising an active 3-HP pathway and a heterologous polynucleotide encoding a 3-HPDH), wherein the recombinant cell further comprises lipase or esterase activity in a medium under suitable conditions to produce a 3-HP ester; and (b) recovering the 3-HP ester. In another aspect is a method of producing a 3-HP ester, comprising: (a) cultivating a recombinant cell described herein (e.g., a recombinant host cell comprising an active 3-HP pathway and a heterologous polynucleotide encoding a 3-HPDH) in a medium under suitable conditions to produce 3-HP; (b) recovering the 3-HP; (c) esterifying the 3-HP under suitable conditions to produce a 3-HP ester; and (d) recovering the 3-HP ester. The recombinant host cells described herein may also be used to produce polymerized 3-HP in vitro or in vivo using techniques known in the art (e.g., Zhou et al Metab. Eng. 2011, 13(6), 777-785; and U.S. Pat. No. 8,030,045; the contents of which are hereby incorporated by reference).

[0252] The 3-HP produced by any of the methods described herein may be converted to acrylic acid. Acrylic acid can be produced by the chemical dehydration of 3-HP using techniques known in the art, e.g., heating in the presence of a catalyst (e.g., a solid oxide dehydration catalyst such as titania or alumina).

[0253] In one aspect is a method of producing acrylic acid or a salt thereof, comprising: (a) cultivating a recombinant cell described herein (e.g., a recombinant host cell comprising an active 3-HP pathway and a heterologous polynucleotide encoding a 3-HPDH) in a medium under suitable conditions to produce 3-HP; (b) recovering the 3-HP; (c) dehydrating the 3-HP under suitable conditions to produce acrylic acid or a salt thereof; and (d) recovering the acrylic acid or salt thereof.

[0254] Suitable assays to test for the production of 3-HP and derivatives thereof for the methods of production and cells described herein can be performed using methods known in the art. For example, final 3-HP product and intermediates (e.g., pyruvate), as well as other organic compounds, can be analyzed by methods such as HPLC (High Performance Liquid Chromatography), GC-MS (Gas Chromatography Mass Spectroscopy) and LC-MS (Liquid Chromatography-Mass Spectroscopy) or other suitable analytical methods using routine procedures well known in the art. The release of 3-HP in the fermentation broth can also be tested with the culture supernatant. Byproducts and residual sugar in the fermentation medium (e.g., glucose) can be quantified by HPLC using, for example, a refractive index detector for glucose and alcohols, and a UV detector for organic acids (Lin et al., Biotechnol. Bioeng. 90:775-779 (2005)), or using other suitable assay and detection methods well known in the art.

[0255] The present invention may be further described by the following numbered paragraphs:

[1] A recombinant yeast cell, comprising an active 3-HP pathway and a heterologous polynucleotide encoding a 3-hydroxypropionate dehydrogenase (3-HPDH), wherein the heterologous polynucleotide:

[0256] (a) encodes an 3-HPDH having at least 60% sequence identity to SEQ ID NO: 197, SEQ ID NO: 199, SEQ ID NO: 201, or SEQ ID NO: 203;

[0257] (b) comprises a coding sequence that hybridizes under at least low stringency conditions with the full-length complementary strand of SEQ ID NO: 196, SEQ ID NO: 198, SEQ ID NO: 200, or SEQ ID NO: 202; or

[0258] (c) comprises a coding sequence having at least 60% sequence identity to SEQ ID NO: 196, SEQ ID NO: 198, SEQ ID NO: 200, or SEQ ID NO: 202;

[0259] wherein the cell capable of producing 3-HP.

[2] The recombinant cell of paragraph [1], wherein the heterologous polynucleotide encodes a 3-HPDH having at least 60%, e.g., at least 65%, 70%, 75%, 80%, 85%, 90%, 95%, 97%, 98%, 99%, or 100% sequence identity to SEQ ID NO: 197, SEQ ID NO: 199, SEQ ID NO: 201, or SEQ ID NO: 203.
[3] The recombinant cell of paragraph [1] or [2], wherein the heterologous polynucleotide encodes a 3-HPDH that differs by no more than ten amino acids, e.g., by no more than five amino acids, by no more than four amino acids, by no more than three amino acids, by no more than two amino acids, or by one amino acid from SEQ ID NO: 197, SEQ ID NO: 199, SEQ ID NO: 201, or SEQ ID NO: 203.
[4] The recombinant cell of paragraph [1], wherein the heterologous polynucleotide encodes a 3-HPDH having an amino acid sequence comprising or consisting of SEQ ID NO: 197, SEQ ID NO: 199, SEQ ID NO: 201, or SEQ ID NO: 203.
[5] The recombinant cell of any one of paragraphs [1]-[4], wherein the heterologous polynucleotide comprises a coding sequence having at least 60%, e.g., at least 65%, at least 70%, at least 75%, at least 80%, at least 85%, at least 90%, at least 95%, at least 96%, at least 97%, at least 98%, at least 99%, or 100% sequence identity to SEQ ID NO: 196, SEQ ID NO: 198, SEQ ID NO: 200, or SEQ ID NO: 202.
[6] The recombinant cell of paragraph [1], wherein the heterologous polynucleotide has a coding sequence that comprises or consists of SEQ ID NO: 196, SEQ ID NO: 198, SEQ ID NO: 200, or SEQ ID NO: 202.
[7] The recombinant cell of any one of paragraphs [1]-[6], wherein the heterologous polynucleotide comprises a coding sequence that hybridizes under at least low stringency conditions e.g., medium stringency conditions, medium-high stringency conditions, high stringency conditions, or very high stringency conditions with the full-length complementary strand of SEQ ID NO: 196, SEQ ID NO: 198, SEQ ID NO: 200, or SEQ ID NO: 202.
[8] The recombinant cell of any one of paragraphs [1]-[7], wherein the 3-HPDH utilizes an NAD(H) cofactor.
[9] The recombinant cell of any one of paragraphs [1]-[8], wherein the 3-HPDH has an increased specificity for the cofactor NAD(H) compared to NADP(H) (e.g., greater than 2-fold, 5-fold, 10-fold, 20-fold, 50-fold, 100-fold, 200-fold, 500-fold, or 1000-fold specificity for NAD(H) compared to NADP(H)).
[10] The recombinant cell of any one of paragraphs [1]-[9], wherein the active 3-HP pathway proceeds through a malonate semialdehyde intermediate.
[11] The recombinant cell of any one of paragraphs [1]-[10], wherein the cell produces a greater amount of 3-HP (e.g., at least 10%, at least 15%, at least 20%, at least 25%, at least 30%, at least 35%, at least 40%, at least 45%, at least 50%, at least 75%, at least 100%, or at least 200% more) compared to the cell without the heterologous polynucleotide encoding the encoding a 3-hydroxypropionate dehydrogenase (3-HPDH) when cultivated under identical conditions.
[12] The recombinant cell of any one of paragraphs [1]-[11], wherein the cell produces a greater amount of 3-HP (e.g., at least 10%, at least 15%, at least 20%, at least 25%, at least 30%, at least 35%, at least 40%, at least 45%, at least 50%, at least 75%, at least 100%, or at least 200% more) compared to a second recombinant cell, when cultivated under identical conditions; wherein the second cell is identical to the yeast cell with the proviso that the second cell encodes the 3-HPDH of SEQ ID NO: 26 in place of the yeast cell 3-HPDH.
[13] The recombinant cell of any one of paragraphs [1]-[12], wherein the cell comprises a heterologous polynucleotide encoding an aspartate 1-decarboxylase (ADC).
[14] The recombinant cell of any one of paragraphs [1]-[13], wherein the cell is Crabtree-negative or Crabtree-positive.
[15] The recombinant cell of any one of paragraphs [1]-[14], wherein the cell belongs to a genus selected from Issatchenkia, Candida, Kluyveromyces, Pichia, Schizosaccharomyces, Torulaspora, Zygosaccharomyces, and Saccharomyces.
[16] The recombinant cell of paragraph [15], wherein the cell belongs to a clade selected from the I. orientalis/P. fermentans clade and the Saccharomyces clade.
[17] The recombinant cell of paragraph [15], wherein the cell is selected from I. orientalis (e.g., CNB1), C. lambica, and S. bulderi.
[18] The recombinant cell of any one of paragraphs [1]-[17], wherein the yeast cell is unable to ferment pentose sugars.
[19] The recombinant cell of any one of paragraphs [1]-[18], wherein said cell further comprises a disruption to one or more endogenous dse2, scw11, eaf3, sed1, or sam2 genes, and/or one or more endogenous genes encoding a PDC, ADH, GALE, CYB2A, CYB2B, GPD, GPP, ALD, or PCK.
[20] The recombinant cell of any one of paragraphs [1]-[19], wherein said cell further comprises a disruption to an endogenous gene encoding a PDC.
[21] The recombinant cell of any one of paragraphs [1]-[20], wherein said cell further comprises a disruption to an endogenous gene encoding a GPD.
[22] A composition comprising the recombinant cell of any one of paragraphs [1]-[21].
[23] The composition of paragraph [22], wherein the composition comprises a fermentable medium.
[24] The composition of paragraph [23], wherein the fermentable medium comprises sucrose, glucose, and/or fructose.
[25] The composition of any one of paragraph [23] or [24], wherein the fermentable medium comprises less than 1% pentose sugars.
[26] The composition of any one of paragraphs [22]-[25], further comprising 3-HP.
[27] The composition of paragraph [26], wherein the 3-HP is at a titer greater than about 1 g/L, e.g., greater than about 2 g/L, 5 g/L, 10 g/L, 15 g/L, 20 g/L, 25 g/L, 30 g/L, 35 g/L, 40 g/L, 45 g/L, 50 g/L, 55 g/L, 60 g/L, 65 g/L, 70 g/L, 75 g/L, 80 g/L, 85 g/L, 90 g/L, 95 g/L, 100 g/L, 125 g/L, 150 g/L, 200 g/L, or 250 g/L.
[28] The composition of any one of paragraphs [22]-[27], wherein the medium is at a pH of less than 6.5, e.g., in the range of about 1.5 to about 4.5, about 2.0 to about 4.0, or about 2.0 to about 3.5.
[29] A method of producing 3-HP, comprising:
[0260] (a) cultivating the recombinant yeast cell of any one of paragraphs [1]-[21] in a fermentable medium under suitable conditions to produce 3-HP; and
[0261] (b) recovering the 3-HP.
   [30] The method of paragraph [29], wherein the fermentable medium comprises sucrose, glucose, and/or fructose.
   [31] The method of paragraph [29] or [30], wherein the fermentable medium comprises less than 1% pentose sugars.
   [32] The method of any one of paragraphs [29]-[31], wherein the produced 3-HP is at a titer greater than about 1 g/L, e.g., greater than about 2 g/L, 5 g/L, 10 g/L, 15 g/L, 20 g/L, 25 g/L, 30 g/L, 35 g/L, 40 g/L, 45 g/L, 50 g/L, 55 g/L, 60 g/L, 65 g/L, 70 g/L, 75 g/L, 80 g/L, 85 g/L, 90 g/L, 95 g/L, 100 g/L, 125 g/L, 150 g/L, 200 g/L, or 250 g/L.
   [33] The method of any one of paragraphs [29]-[32], wherein the resulting 3-HP is substantially pure.
   [34] The method of any one of paragraphs [29]-[33], wherein the fermentable medium is at a pH of less than 6.5, e.g., in the range of about 1.5 to about 4.5, about 2.0 to about 4.0, or about 2.0 to about 3.5.
   [35] A method of producing acrylic acid or a salt thereof, comprising:
[0262] (a) cultivating the recombinant cell of any one of paragraphs [1]-[21] in a fermentable medium under suitable conditions to produce 3-HP;
[0263] (b) recovering the 3-HP;
[0264] (c) dehydrating the 3-HP under suitable conditions to produce acrylic acid or a salt thereof; and
[0265] (d) recovering the acrylic acid or salt thereof.
   [36] A method of producing a 3-HP ester, comprising:
[0266] (a) cultivating the recombinant cell of any one of paragraphs [1]-[21] in a fermentable medium under suitable conditions to produce 3-HP;
[0267] (b) recovering the 3-HP;
[0268] (c) esterifying the 3-HP under suitable conditions to produce a 3-HP ester; and
[0269] (d) recovering the 3-HP ester
   [37] A method of producing 1,3-propanediol, comprising:
[0270] (a) cultivating the recombinant cell of any one of paragraphs [1]-[21] in a fermentable medium under suitable conditions to produce 3-HP;
[0271] (b) recovering the 3-HP;
[0272] (c) hydrogenating the 3-HP under suitable conditions to produce 1,3-propanediol; and
[0273] (d) recovering the 1,3-propanediol.
   [38] The method of any one of paragraphs [29]-[37] wherein the recombinant cell is a CNB1 cell cultivated in a fermentable medium comprising less than 1% pentose sugars.

[0274] The following examples are provided by way of illustration and are not intended to be limiting of the invention.

### EXAMPLES

[0275] Chemicals used as buffers and substrates were commercial products of at least reagent grade.

### Strains

[0276] The strain MeJi412 was constructed from I. orientalis CD1822 as described in WO 2012/074818 (the content of which is incorporated herein by reference) and expresses an ADC gene to provide an active 3-HP pathway that proceeds through a malonate semialdehyde intermediate.

[0277] The strains McTs244/McTs259 were constructed from I. orientalis MeJi412, as described in WO 2012/074818 (the content of which is incorporated herein by reference), and further comprises a disruption of the native 3-HPDH gene.

[0278] The strain MBin556 was constructed from I. orientalis McTs259, as described in WO 2013/049073 (the content of which is incorporated herein by reference), and further expresses the native 3-HPDH at the adh9091 locus.

[0279] The strain McTs263 was constructed from I. orientalis McTs259, as described in WO 2012/074818 (the content of which is incorporated herein by reference), and further expresses the E. coli 3-HPDH of SEQ ID NO: 27 at the adh9091 locus.

[0280] The strain McTs276 was constructed from I. orientalis McTs259, as described in WO 2013/049073 (the content of which is incorporated herein by reference), and further expresses the P. putida 3-HPDH of SEQ ID NO: 30 at the adh9091 locus.

### Media and Solutions

[0281] 2× YT+amp plates were composed of 16 g/L tryptone, 10 g/L yeast extract, 5 g/L NaCl, 100 mg/L ampicillin, and 15 g/L Bacto agar.
ura selection plates were composed of 6.7 g yeast nitrogen base with ammonium sulfate, 5 g casamino acids, 100 mL 0.5 M succinic acid pH 5, 20 g Noble agar, and 855 mL deionized water. Following autoclave sterilization, 40 mL sterile 50% glucose and 2 mL 10 mg/mL chloraphenicol were added and plates poured.
ura selection media was composed of 6.7 g yeast nitrogen base with ammonium sulfate, 5 g casamino acids, 100 mL 0.5 M succinic acid pH 5, and 855 mL deionized water. Following autoclave sterilization, 40 mL sterile 50% glucose and 2 mL 10 mg/mL chloraphenicol were added.
YP+10% glucose media was composed of 500 mL YP broth and 100 mL sterile 50% glucose.
YP broth was composed of 10 g/L of yeast extract, 20 g/L of peptone.
TBE was composed of 10.8 g/L of Tris base, 5.5 g/L boric acid, and 4 mL/L of 0.5 M EDTA pH 8.0.
LiOAc/TE solution was composed of 8 parts sterile water, 1 part 1 M LiOAc, and 1 part 10×TE.
10×TE (200 mL) was composed of 2.42 g Tris Base, 4 mL 0.5M EDTA, pH 8.0. 5 M HCl was used to adjust the pH to 7.5 and the solution was sterilized by autoclave.
PEG/LiOAc/TE Solution was composed of 8 parts 50% PEG3350, 1 part 1 M LiOAc, and 1 part 10×TE.
50% PEG3350 was prepared by adding 100 g PEG3350 to 150 mL water and heating and stirring until dissolved. The volume was then brought up to 200 mL with water and the sterilized by autoclave.
Trace element solution was composed of EDTA (15.0 g/L), zinc sulfate heptahydrate (4.5 g/L), manganese chloride dehydrate (1.0 g/L), Cobalt(II)chloride hexahydrate (0.3 g/L), Copper(II)sulfate pentahydrate (0.3 g/L), disodium molybdenum dehydrate (0.4 g/L), calcium chloride dehydrate (4.5 g/L), iron sulphate heptahydrate (3 g/L), boric acid (1.0 g/L), and potassium iodide (0.1 g/L).
Vitamin solution was composed of biotin (D−; 0.05 g/L), calcium pantothenate (D+; 1 g/L), nicotinic acid (5 g/L), myo-inositol (25 g/L), pyridoxine hydrochloride (1 g/L), p-aminobenzoic acid (0.2 g/L), and thiamine hydrochloride (1 g/L).
CNB1 shake flask media was composed of urea (2.3 g/L), magnesium sulfate heptahydrate (0.5 g/L), potassium phosphate monobasic (3.0 g/L), trace element solution (1 mL/L) and vitamin solution (1 mL/L), glucose (120.0 g/L), 2-(N-Morpholino)ethanesulfonic acid (MES) (97.6 g/L). After dissolving all medium components, the pH of the medium was adjusted to an initial pH of 5.8 using an appropriate base (e.g., KOH).

TABLE 1
Primers sequences

| | SEQ | |
|---|---|---|
| | ID | |
| Identifier | NO: | Sequence (5′-3′) |
| 611245 | 204 | CGAACCAATTCAAGAAAACCAAC |
| 611815 | 205 | CTCCTTCATTTAACTATACCAGACG |
| 612794 | 206 | GAAGGGGGTCCAAGTTATCC |
| 612795 | 207 | CCAACAATCTTAATTGGTGAC |
| 612908 | 208 | GATATGGGCGGTAGAGAAGA |
| 612909 | 209 | GCTCCTTCAAAGGCAACACA |
| 613034 | 210 | TGATTCCTTCAATCACAGGT |
| 613241 | 211 | GCATGTCTGTTAACTCTCAAACCAT |
| 614626 | 212 | AGGGTACCTTAGTACGAAGG |
| 614627 | 213 | CTATTCTTACGATGAAGGCG |

### Example 1: Procedure for DNA Transformation

[0282] DNA transformation into the host genome to generate the recombinant strains described in the following examples was conducted based on the specific procedure below.

[0283] Three mL of YP+10% glucose media was added to a 14 mL Falcon tube and the desired strain was inoculated into this media using a sterile loop. The culture was grown with shaking at 250 rpm overnight (˜16 hr) at 37° C. 0.5 mL of the overnight culture was added to a 125 mL baffled flask containing 25 mL of liquid YP+10% glucose media. The flask was grown with shaking at 250 rpm at 37° C. Small aliquots of the culture were withdrawn at approximately hourly intervals and the OD₆₀₀ was measured. The culture was grown until the OD₆₀₀ was 0.6-1.0.

[0284] The cells were harvested by centrifugation at 2279×g at room temperature, the pellet was resuspended in 25 mL sterile water, then centrifuged at 2279×g at room temperature. The pellet was resuspended in 1 mL sterile water, and the resuspended cells were transferred to a 1.5 mL tube and then pelleted at 16,100×g. The cells were resuspended in 1 mL LiOAc/TE solution and then pelleted at 16,100×g. The cell pellet was then resuspended in 250 μL LiOAc/TE solution.

[0285] The following components were added to a 1.5 mL tube: 100 μL of the above cells, 10 μL freshly boiled then iced salmon sperm DNA (Agilent Technologies, Santa Clara, Calif., USA), and 10 μL of the desired, linearized transforming DNA. A control reaction with water instead of DNA was also prepared. To each transformation reaction, 600 μL of PEG/LiOAc/TE Solution was added, followed by 40 μL DMSO and the reactions were inverted several times to mix. The transformation reactions were incubated in a 42° C. water bath for 15 minutes, and cells were pelleted at 5,400×g for 1 min. Cells were resuspended in water, split in two, and each half of the transformation reaction was plated to a ura selection media plate. Plates were placed at 37° C. Colonies were visible after 2 days of growth.

### Example 2: Construction of an Insertion Vector for Expressing a Heterologous Candida parapsilosis 3-hydroxypropionate Dehydrogenase (3-HPDH) at the adh9091 Locus (pMcTs325)

[0286] The plasmid pMcTs325 was designed to allow integration of a Candida parapsilosis 3-HPDH coding sequence at the adh9091 locus under the control of the PDC promoter and terminator using URA3 as a selectable marker, and was constructed as described below.

[0287] Plasmid pMBin204 (described in WO2012074818) was digested XbaI and PacI. The resulting fragments were separated by 1% TBE-agarose gel electrophoresis and visualized with a DARK READER™ (Clare Chemical Research). The desired 8.4 kb fragment of pMBin204 was excised from the gel and purified using a NucleoSpin Gel and PCR clean up kit (Macherey-Nagel) according to the manufacturer's instructions.

[0288] A codon-optimized version of the 3-HPDH coding sequence from C. parapsilosis without a mitochondrial targeting sequence (SEQ ID NO: 196) and flanked by 5′ XbaI and 3′ PacI restriction sites was provided by GeneArt (Life Technologies Corporation) as a plasmid designated 14ABQBJP. This plasmid was digested with XbaI and PacI and the desired 1 kb fragment containing the C. parapsilosis 3-HPDH coding sequence was gel isolated and purified using a NucleoSpin Gel and PCR clean up kit (Macherey-Nagel) according to the manufacturer's instructions.

[0289] Cloning of the 14ABQBJP DNA fragment containing the coding sequence of the C. parapsilosis 3-HPDH coding sequence (supra) into the 8.4 kbp pMBin204 linearized vector (supra) was performed using T4 DNA ligase (New England Biolabs). The reaction mixture contained 1×T4 DNA ligase buffer, 1 μl T4 DNA ligase, 1 μl of the pMBin204 XbaI/PacI digested DNA fragment above, and 5 μl of the 14ABQBJP DNA fragment above in total volume of 20 μl. The reaction mixture was incubated at room temperature for at least 1 hour and subsequently transformed into Stellar Competent Cells (Clontech) according to manufacturer's instructions. After a recovery period, two 100 μl aliquots from the transformation mixture were plated onto 150 mm 2XYT plates supplemented with 100 μg of ampicillin per ml and incubated overnight at 37° C. Putative recombinant colonies of the transformations were inoculated into 3 ml of LB medium supplemented with ampicillin (100 μg/ml). Plasmid DNA was prepared from these cultures using a BIOROBOT® 9600 workstation (Qiagen, Inc.) and analyzed by restriction digestion and sequencing. The plasmid DNA from one clone having the correct restriction digest pattern was designated pMcTs325 (FIG. 2).

[0290] Plasmid pMcTs325 contains a C. parapsilosis 3-HPDH coding sequence (SEQ ID NO: 196, which encodes for SEQ ID NO: 197) under control of the PDC promoter and terminator, with the URA3 selectable marker flanked by regions of homology to the adh9091 locus.

### Example 3: Construction of an Insertion Vector for Expressing a Heterologous Debaryomyces hansenii 3-hydroxypropionate Dehydrogenase (3-HPDH) at the adh9091 Locus (pMcTs326)

[0291] The plasmid pMcTs326 was designed to allow integration of a Debaryomyces hansenii_3-HPDH coding sequence at the adh9091 locus under the control of the PDC promoter and terminator using URA3 as a selectable marker, and was constructed as described below.

[0292] Plasmid pMBin204 (described in WO2012074818) was digested XbaI and PacI. The resulting fragments were separated by 1% TBE-agarose gel electrophoresis and visualized with a DARK READER™ (Clare Chemical Research). The desired 8.4 kb fragment of pMBin204 was excised from the gel and purified using a NucleoSpin Gel and PCR clean up kit (Macherey-Nagel) according to the manufacturer's instructions.

[0293] A codon-optimized version of the 3-HPDH coding sequence from D. hansenii without a mitochondrial targeting sequence (SEQ ID NO: 198) and flanked by 5′ XbaI and 3′ PacI restriction sites, was provided by GeneArt (Life Technologies Corporation) as a plasmid designated 14ABQBIP. This plasmid was digested with XbaI and PacI and the desired 1 kb fragment containing the D. hansenii 3-HPDH coding sequence was gel isolated and purified using a NucleoSpin Gel and PCR clean up kit (Macherey-Nagel) according to the manufacturer's instructions.

[0294] Cloning of the 14ABQBIP DNA fragment containing the coding sequence of the D. hansenii 3-HPDH coding sequence (supra) into the 8.4 kbp pMBin204 linearized vector (supra) was performed using T4 DNA ligase (New England Biolabs). The reaction mixture contained 1×T4 DNA ligase buffer, 1 μl T4 DNA ligase, 1 μl of the pMBin204 XbaI/PacI digested DNA fragment above, and 5 μl of the 14ABQBIP DNA fragment above in total volume of 20 μl. The reaction mixture was incubated at room temperature for at least 1 hour and subsequently transformed into Stellar Competent Cells (Clontech) according to manufacturer's instructions. After a recovery period, two 100 μl aliquots from the transformation mixture were plated onto 150 mm 2XYT plates supplemented with 100 μg of ampicillin per ml and incubated overnight at 37° C. Putative recombinant colonies of the transformations were inoculated into 3 ml of LB medium supplemented with ampicillin (100 μg/ml). Plasmid DNA was prepared from these cultures using a BIOROBOT® 9600 workstation (Qiagen, Inc.) and analyzed by restriction digestion and sequencing. The plasmid DNA from one clone having the correct restriction digest pattern was designated pMcTs326 (FIG. 3).

[0295] Plasmid pMcTs326 contains a D. hansenii 3-HPDH coding sequence (SEQ ID NO: 198, which encodes for SEQ ID NO: 199) under control of the PDC promoter and terminator, with the URA3 selectable marker flanked by regions of homology to the adh9091 locus.

### Example 4: Construction of an Insertion Vector for Expressing a Heterologous Meyerozyma guilliermondii 3-hydroxypropionate Dehydrogenase (3-HPDH) at the adh9091 Locus (pMcTs319)

[0296] The plasmid pMcTs319 was designed to allow integration of a Meyerozyma guilliermondii 3-HPDH coding sequence at the adh9091 locus under the control of the PDC promoter and terminator using URA3 as a selectable marker, and was constructed as described below.

[0297] Plasmid pMBin204 (described in WO2012074818) was digested XbaI and PacI. The resulting fragments were separated by 1% TBE-agarose gel electrophoresis and visualized with a DARK READER™ (Clare Chemical Research). The desired 8.4 kb fragment of pMBin204 was excised from the gel and purified using a NucleoSpin Gel and PCR clean up kit (Macherey-Nagel) according to the manufacturer's instructions.

[0298] A codon-optimized version of the 3-HPDH coding sequence from M. guilliermondii without a mitochondrial targeting sequence (SEQ ID NO: 200) and flanked by 5′ XbaI and 3′ PacI restriction sites, was provided by GeneArt (Life Technologies Corporation) as a DNA String designated 14ABLQXP.

[0299] Cloning of the 14ABLQXP DNA fragment containing the coding sequence of the M. guilliermondii 3-HPDH coding sequence (supra) into the 8.4 kbp pMBin204 linearized vector (supra) was performed using InFusion HD (Clontech). The reaction mixture contained 1× InFusion HD Premix, 200 ng of the 8.4 kbp vector, 50 ng 14ABLQ3P DNA in total volume of 10 μl. The reaction mixture was incubated at 50° C. for 15 minutes and subsequently transformed into Stellar Competent Cells (Clontech) according to manufacturer's instructions. After a recovery period, two 100 μl aliquots from the transformation mixture were plated onto 150 mm 2XYT plates supplemented with 100 μg of ampicillin per ml and incubated overnight at 37° C. Putative recombinant colonies of the transformations were inoculated into 3 ml of LB medium supplemented with ampicillin (100 μg/ml). Plasmid DNA was prepared from these cultures using a BIOROBOT® 9600 workstation (Qiagen, Inc.) and analyzed by restriction digestion and sequencing. The plasmid DNA from one clone having the correct restriction digest pattern was designated pMcTs319 (FIG. 4).

[0300] Plasmid pMcTs319 contains a M. guilliermondii 3-HPDH coding sequence (SEQ ID NO: 200, which encodes for SEQ ID NO: 201) under control of the PDC promoter and terminator, with the URA3 selectable marker flanked by regions of homology to the adh9091 locus.

### Example 5: Construction of an Insertion Vector for Expressing a Heterologous Clavispora lusitaniae 3-hydroxypropionate Dehydrogenase (3-HPDH) at the adh9091 Locus (pMcTs318)

[0301] The plasmid pMcTs318 was designed to allow integration of a Clavispora lusitaniae 3-HPDH coding sequence at the adh9091 locus under the control of the PDC promoter and terminator using URA3 as a selectable marker, and was constructed as described below.

[0302] Plasmid pMBin204 (described in WO2012074818) was digested XbaI and PacI. The resulting fragments were separated by 1% TBE-agarose gel electrophoresis and visualized with a DARK READER™ (Clare Chemical Research). The desired 8.4 kb fragment of pMBin204 was excised from the gel and purified using a NucleoSpin Gel and PCR clean up kit (Macherey-Nagel) according to the manufacturer's instructions.

[0303] A codon-optimized version of the 3-HPDH coding sequence from Clavispora lusitaniae without a mitochondrial targeting sequence (SEQ ID NO: 202) and flanked by 5′ XbaI and 3′ PacI restriction sites, was provided by GeneArt (Life Technologies Corporation) as a DNA String designated 14ABLQ3P.

[0304] Cloning of the 14ABLQ3P DNA fragment containing the coding sequence of the C. lusitaniae 3-HPDH coding sequence (supra) into the 8.4 kbp pMBin204 linearized vector (supra) was performed using InFusion HD (Clontech). The reaction mixture contained 1× InFusion HD Premix, 200 ng of the 8.4 kbp vector, 50 ng 14ABLQ3P DNA in total volume of 10 μl. The reaction mixture was incubated at 50° C. for 15 minutes and subsequently transformed into Stellar Competent Cells (Clontech) according to manufacturer's instructions. After a recovery period, two 100 μl aliquots from the transformation mixture were plated onto 150 mm 2XYT plates supplemented with 100 μg of ampicillin per ml and incubated overnight at 37° C. Putative recombinant colonies of the transformations were inoculated into 3 ml of LB medium supplemented with ampicillin (100 μg/ml). Plasmid DNA was prepared from these cultures using a BIOROBOT® 9600 workstation (Qiagen, Inc.) and analyzed by restriction digestion and sequencing. The plasmid DNA from one clone having the correct restriction digest pattern was designated pMcTs318 (FIG. 5).

[0305] Plasmid pMcTs318 contains a C. lusitaniae 3-HPDH coding sequence (SEQ ID NO: 202, which encodes for SEQ ID NO: 203) under control of the PDC promoter and terminator, with the URA3 selectable marker flanked by regions of homology to the adh9091 locus.

### Example 6: Construction of Recombinant Strains Expressing a Heterologous 3-hydroxypropionate Dehydrogenase (3-HPDH) at the adh9091 Locus

[0306] Approximately 10 μg each of each of pMcTs318, pMcTs319, pMcTs325, and pMcTs326 from Examples 2-5 was digested with ApaI, SacI and EheI and separated on a 0.7% agarose gel using 89 mM Tris base-89 mM Boric Acid-2 mM disodium EDTA (TBE) buffer. The desired approximately 5.6 kb fragments were excised from the gel and purified using NucleoSpin Gel and PCR clean up kit (Macherey-Nagel) according to the manufacturer's instructions. The linear constructs were transformed into I. orientalis CNB1 McTs259 (supra; See also WO2012074818) as described above.

[0307] Several single isolates from each transformation were screened for the site of integration as well as confirming that the other loci were still modified. The integration at adh9091 was confirmed by LongAmp Taq (New England Biolabs) according to the manufacturer's instructions using primers 614627+612909 and 612908+614626. The PCR product from 612908+614626 yielded an approximately 2.0 kb band and the product from 614627+612909 yielded an approximately 3.5 kb band for each of pMcTs318, pMcTs319, pMcTs325, and pMcTs326. The modified adh1202 locus and modified YMR226c locus were also confirmed using primer sets 611245+612794 (to yield an approximately 3 kb band) and 611815+612795 (to yield an approximately 3.6 kb band) for the adh1202 locus, and primer set 613034+613241 (to yield an approximately 1.4 kb band) for YMR226c locus. For each integration cassette, three transformants with the correct size bands for the PCRs were designed as shown in Table 2.

TABLE 2

| | 3HP dehydrogenase gene | |
|---|---|---|
| Plasmid | source | Resulting strains |
| pMcTs318 | Clavispora lusitaniae | McTs607, McTs608, McTs609 |
| | (encodes SEQ ID NO: 203) | |
| pMcTs319 | Meyerozyma guilliermondii | McTs610, McTs611, McTs612 |
| | (encodes SEQ ID NO: 201) | |
| pMcTs325 | Candida parapsilosis | McTs628, McTs629, McTs630 |
| | (encodes SEQ ID NO: 197) | |
| pMcTs326 | Debaryomyces hansenii | McTs631, McTs632, McTs633 |
| | (encodes SEQ ID NO: 199) | |

### Example 7: 3-HP Production and Enzymatic Activity of Recombinant Strains Expressing a Heterologous 3-hydroxypropionate Dehydrogenase (3-HPDH)

[0308] Strains McTs608, McTs610, McTs628, McTs631 (Example 6); MeJi412, McTs244, McTs263 (supra; See also WO2012074818); and MBin556, McTs276 (supra; See also WO2013049073) were grown in shake flasks according to the following procedure. The strains were streaked out for single colonies on Ura Selection Plates and incubated at 30° C. for 1-2 days. Seed cultures were prepared in 250 ml baffled flasks containing 50 mL CNB1 shake flask media inoculated with 1-2 colonies from the Ura Selection Plate. The seed cultures were grown for approximately 18 hours at 30° C. with shaking at 200 rpm. Small aliquots of the culture were then withdrawn to measure the OD600 until reaching an OD600 of 4-6. The seed flask cultivation was used to inoculate 125 ml baffled flasks containing 50 mL CNB1 shake flask media to an OD600=0.2. Cultures were incubated at 30° C. with shaking at 140 rpm for 20 hr. An aliquot of the sample was used to measure the optical density (OD) of the culture. The remainder of the sample was then centrifuged and samples from the supernatant were used for 3-HP analysis as described in WO2012074818. The cell pellet was then used for the 3-HPDH enzyme assay analysis. The results in Table 2 show that disruption of the native 3-HPDH gene results in no detectable 3-HP production (McTs244) and that 3-HP production can be restored by expressing a gene encoding the 3-HPDH from C. lusitaniae (SEQ ID NO: 203), M. guilliermondii (SEQ ID NO: 201), C. parapsilosis (SEQ ID NO: 197), or D. hansenii (SEQ ID NO: 199) at the adh9091 locus. The data also shows these strains show improved 3-HP production when compared to McTs263 (expressing the E. coli 3-HPDH of SEQ ID NO: 27) and McTs276 (expressing the P. putida 3-HPDH of SEQ ID NO: 30).

[0309] The 3HPDH activity of these strains was assayed using a forward malonate semi-aldehyde reductase assay by measuring the disappearance of either NADH or NADPH over time at 340 nm. Malonate semi-aldehyde was synthesized in-house according to the protocol developed by Yamada and Jacoby (Yamada, E. W., Jacoby, W. B., 1960, Direct conversion of malonic semialdehyde to acetyl-coenzyme A, Journal of Biological Chemistry, Volume 235, Number 3, pp. 589-594). The assay was performed in a 96 well micro-plate, and the final volume was 200 μL. The reaction was started by adding 10 μL of cleared cell extract into 190 μL of assay buffer (5 mM malonate semialdehyde, 50 mM potassium phosphate pH 6.0 and 0.5 mM either NADH or NADPH). Absorbance at 340 nm was followed on a micro-plate reader (Spectra Max 340PC, Molecular Devices LLC, Sunnyvale, Calif.) for 10 minutes at room temperature (˜25° C.). One unit was defined as the amount of enzyme necessary to oxidize 1 μmol of either NADH or NADPH in one minute in the presence of malonate semialdehyde at pH 6.0, 25° C. The results using the malonate semi-aldehyde reductase assay (Table 3) show that Applicant's recombinant strains have increased 3-HPDH activity with the NADH cofactor compared to similar strains expressing the native 3-HPDH (MBin556), E. coli 3-HPDH (McTs263), or P. putida 3-HPDH (McTs276).

TABLE 3

| | | | NADH | NADPH |
|---|---|---|---|---|
| | | | 3-HPDH | 3-HPDH |
| | | | activity | activity |
| | | 3HP | (μmol/ | (μmol/ |
| | | (g/L)/ | min/g) | min/g) |
| Strain | 3-HPDH gene | OD600 | pH 6.0 | pH 6.0 |
| MeJi412 | Native | 0.096 | 24 | 156 |
| | I. orientalis | | | |
| | 3-HPDH | | | |
| McTs244 | Disrupted native | 0.000 | 12 | 25 |
| | I. orientalis | | | |
| | 3-HPDH | | | |
| MBin556 | McTs244 expressing | 0.209 | 18 | 265 |
| | I. orientalis | | | |
| | 3-HPDH at adh9091 locus | | | |
| McTs263 | McTs244 expressing | 0.162 | 11 | 372 |
| | E. coli | | | |
| | 3-HPDH at adh9091 locus | | | |
| McTs276 | McTs244 expressing | 0.104 | 1985 | 182 |
| | P. putida | | | |
| | 3-HPDH at adh9091 locus | | | |
| McTs608 | McTs244 expressing | 0.183 | 6852 | 401 |
| | C. lusitaniae | | | |
| | 3-HPDH at adh9091 locus | | | |
| McTs610 | McTs244 expressing | 0.181 | 4767 | 283 |
| | M. guilliermondi | | | |
| | 3-HPDH at adh9091 locus | | | |
| McTs628 | McTs244 expressing | 0.281 | 9469 | 284 |
| | C. parapsilosis | | | |
| | 3-HPDH at adh9091 locus | | | |
| McTs631 | McTs244 expressing | 0.164 | 635 | 19 |
| | D. hansenii | | | |
| | 3-HPDH at adh9091 locus | | | |

[0310] Although the foregoing has been described in some detail by way of illustration and example for the purposes of clarity of understanding, it is apparent to those skilled in the art that any equivalent aspect or modification may be practiced. Therefore, the description and examples should not be construed as limiting the scope of the invention.

1. A recombinant yeast cell, comprising an active 3-HP pathway and a heterologous polynucleotide encoding a 3-hydroxypropionate dehydrogenase (3-HPDH), wherein the heterologous polynucleotide:
(a) encodes an 3-HPDH having at least 80% sequence identity to SEQ ID NO: 197, SEQ ID NO: 199, SEQ ID NO: 201, or SEQ ID NO: 203;
(b) comprises a coding sequence that hybridizes under at least high stringency conditions with the full-length complementary strand of SEQ ID NO: 196, SEQ ID NO: 198, SEQ ID NO: 200, or SEQ ID NO: 202; or
(c) comprises a coding sequence having at least 80% sequence identity to SEQ ID NO: 196, SEQ ID NO: 198, SEQ ID NO: 200, or SEQ ID NO: 202;
wherein the cell capable of producing 3-HP.

2. The recombinant cell of claim 1, wherein the heterologous polynucleotide encodes a 3-HPDH having at least 80% sequence identity to SEQ ID NO: 197, SEQ ID NO: 199, SEQ ID NO: 201, or SEQ ID NO: 203.

3. The recombinant cell of claim 1, wherein the heterologous polynucleotide encodes a 3-HPDH that differs by no more than ten amino acids from SEQ ID NO: 197, SEQ ID NO: 199, SEQ ID NO: 201, or SEQ ID NO: 203.

4. The recombinant cell of claim 1, wherein the heterologous polynucleotide encodes a 3-HPDH having an amino acid sequence comprising or consisting of SEQ ID NO: 197, SEQ ID NO: 199, SEQ ID NO: 201, or SEQ ID NO: 203.

5. The recombinant cell of claim 1, wherein the heterologous polynucleotide comprises a coding sequence having at least 80% sequence identity to SEQ ID NO: 196, SEQ ID NO: 198, SEQ ID NO: 200, or SEQ ID NO: 202.

6. The recombinant cell of claim 1, wherein the heterologous polynucleotide has a coding sequence that comprises or consists of SEQ ID NO: 196, SEQ ID NO: 198, SEQ ID NO: 200, or SEQ ID NO: 202.

7. The recombinant cell of claim 1, wherein the heterologous polynucleotide comprises a coding sequence that hybridizes under at least high stringency conditions with the full-length complementary strand of SEQ ID NO: 196, SEQ ID NO: 198, SEQ ID NO: 200, or SEQ ID NO: 202.

8. The recombinant cell of claim 1, wherein the 3-HPDH utilizes an NAD(H) cofactor.

9. The recombinant cell of claim 1, wherein the 3-HPDH has an increased specificity for the cofactor NAD(H) compared to NADP(H).

10. The recombinant cell of claim 1, wherein the active 3-HP pathway proceeds through a malonate semialdehyde intermediate.

11. The recombinant cell of claim 1, wherein the cell produces a greater amount of 3-HP compared to the cell without the heterologous polynucleotide encoding the encoding a 3-hydroxypropionate dehydrogenase (3-HPDH) when cultivated under identical conditions.

12. The recombinant cell of claim 1, wherein the cell comprises a heterologous polynucleotide encoding an aspartate 1-decarboxylase (ADC).

13. The recombinant cell of claim 1, wherein the cell belongs to a genus selected from Issatchenkia, Candida, Kluyveromyces, Pichia, Schizosaccharomyces, Torulaspora, Zygosaccharomyces, and Saccharomyces.

14. The recombinant cell of claim 13, wherein the cell belongs to a clade selected from the I. orientalis/P. fermentans clade and the Saccharomyces clade.

15. The recombinant cell of claim 13, wherein the cell is selected from I. orientalis, C. lambica, and S. bulderi.

16. The recombinant cell of claim 1, wherein the yeast cell is unable to ferment pentose sugars.

17. The recombinant cell of claim 1, wherein said cell further comprises a disruption to one or more endogenous dse2, scw11, eaf3, sed1, or sam2 genes, and/or one or more endogenous genes encoding a PDC, ADH, GALE, CYB2A, CYB2B, GPD, GPP, ALD, or PCK.

18. A method of producing 3-HP, comprising:
(a) cultivating the recombinant yeast cell of claim 1 in a fermentable medium under suitable conditions to produce 3-HP; and
(b) recovering the 3-HP.

19. A method of producing acrylic acid or a salt thereof, comprising:
(a) cultivating the recombinant cell of claim 1 in a fermentable medium under suitable conditions to produce 3-HP;
(b) recovering the 3-HP;
(c) dehydrating the 3-HP under suitable conditions to produce acrylic acid or a salt thereof; and
(d) recovering the acrylic acid or salt thereof.

20. The method of claim 18 wherein the recombinant cell is a CNB1 cell cultivated in a fermentable medium comprising less than 1% pentose sugars.

The application's sequence listing, which the Patent Office published only in electronic form, follows.

SEQUENCE LISTING (213 sequences)

SEQ ID NO: 1 - DNA, 3543 bp, Issatchenkia orientalis
atgtcaactgtggaagatcactcctccctacataaattgagaaaggaatctgagattctttccaatgcaaacaaaatcttagtggctaatagaggtgaaattccaattagaattttcaggtcagcccatgaattgtcaatgcatactgtggcgatctattcccatgaagatcggttgtccatgcataggttgaaggccgacgaggcttatgcaatcggtaagactggtcaatattcgccagttcaagcttatctacaaattgacgaaattatcaaaatagcaaaggaacatgatgtttccatgatccatccaggttatggtttcttatctgaaaactccgaattcgcaaagaaggttgaagaatccggtatgatttgggttgggcctcctgctgaagttattgattctgttggtgacaaggtttctgcaagaaatttggcaattaaatgtgacgttcctgttgttcctggtaccgatggtccaattgaagacattgaacaggctaaacagtttgtggaacaatatggttatcctgtcattataaaggctgcatttggtggtggtggtagaggtatgagagttgttagagaaggtgatgatatagttgatgctttccaaagagcgtcatctgaagcaaagtctgcctttggtaatggtacttgttttattgaaagatttttggataagccaaaacatattgaggttcaattattggctgataattatggtaacacaatccatctctttgaaagagattgttctgttcaaagaagacatcaaaaggttgttgaaattgcacctgccaaaactttacctgttgaagttagaaatgctatattaaaggatgctgtaacgttagctaaaaccgctaactatagaaatgctggtactgcagaatttttagttgattcccaaaacagacattattttattgaaattaatccaagaattcaagttgaacatacaattactgaagaaatcacgggtgttgatattgttgccgctcaaattcaaattgctgcaggtgcatcattggaacaattgggtctattacaaaacaaaattacaactagaggttttgcaattcaatgtagaattacaaccgaggatcctgctaagaattttgccccagatacaggtaaaattgaggtttatagatctgcaggtggtaacggtgtcagattagatggtggtaatgggtttgccggtgctgttatatctcctcattatgactcgatgttggttaaatgttcaacatctggttctaactatgaaattgccagaagaaagatgattagagctttagttgaatttagaatcagaggtgtcaagaccaatattcctttcttattggcattgctaactcatccagttttcatttcgggtgattgttggacaacttttattgatgataccccttcgttattcgaaatggtttcttcaaagaatagagcccaaaaattattggcatatattggtgacttgtgtgtcaatggttcttcaattaaaggtcaaattggtttccctaaattgaacaaggaagcagaaatcccagatttgttggatccaaatgatgaggttattgatgtttctaaaccttctaccaatggtctaagaccgtatctattaaagtatggaccagatgcgttttccaaaaaagttcgtgaattcgatggttgtatgattatggataccacctggagagatgcacatcaatcattattggctacaagagttagaactattgatttactgagaattgctccaacgactagtcatgccttacaaaatgcatttgcattagaatgttggggtggcgcaacatttgatgttgcgatgaggttcctctatgaagatccttgggagagattaagacaacttagaaaggcagttccaaatattcctttccaaatgttattgagaggtgctaatggtgttgcttattcgtcattacctgataatgcaattgatcattttgttaagcaagcaaaggataatggtgttgatattttcagagtctttgatgctttgaacgatttggaacaattgaaggttggtgttgatgctgtcaagaaagccggaggtgttgttgaagctacagtttgttactcaggtgatatgttaattccaggtaaaaagtataacttggattattatttagagactgttggaaagattgtggaaatgggtacccatattttaggtattaaggatatggctggcacgttaaagccaaaggctgctaagttgttgattggctcgatcagatcaaaataccctgacttggttatccatgtccatacccatgactctgctggtaccggtatttcaacttatgttgcatgcgcattggcaggtgccgacattgtcgattgtgcaatcaattcgatgtctggtttaacctctcaaccttcaatgagtgcttttattgctgctttagatggtgatatcgaaactggtgttccagaacattttgcaagacaattagatgcatactgggcagaaatgagattgttatactcatgtttcgaagccgacttgaagggaccagacccagaagtttataaacatgaaattccaggtggacagttgactaacctaatcttccaagcccaacaagttggtttgggtgaacaatgggaagaaactaagaagaagtatgaagatgctaacatgttgttgggtgatattgtcaaggttaccccaacctccaaggttgttggtgatttagcccaatttatggtttctaataaattagaaaaagaagatgttgaaaaacttgctaatgaattagatttcccagattcagttcttgatttctttgaaggattaatgggtacaccatatggtggattcccagagcctttgagaacaaatgtcatttccggcaagagaagaaaattaaagggtagaccaggtttagaattagaacctttcaacctcgaggaaatcagagaaaatttggtttccagatttggtccaggtattactgaatgtgatgttgcatcttataacatgtatccaaaggtttacgagcaatatcgtaaggtggttgaaaaatatggtgatttatctgttttaccaacaaaagcatttttggctcctccaactattggtgaagaagttcatgtggaaattgagcaaggtaagactttgattattaagttattagccatttctgacttgtctaaatctcatggtacaagagaagtatactttgaattgaatggtgaaatgagaaaggttacaattgaagataaaacagctgcaattgagactgttacaagagcaaaggctgacggacacaatccaaatgaagttggtgcgccaatggctggtgtcgttgttgaagttagagtgaagcatggaacagaagttaagaagggtgatccattagccgttttgagtgcaatgaaaatggaaatggttatttctgctcctgttagtggtagggtcggtgaagtttttgtcaacgaaggcgattccgttgatatgggtgatttgcttgtgaaaattgccaaagatgaagcgccagcagcttaa

SEQ ID NO: 2 - protein, 1180 aa, Issatchenkia orientalis
MSTVEDHSSLHKLRKESEILSNANKILVANRGEIPIRIFRSAHELSMHTVAIYSHEDRLSMHRLKADEAYAIGKTGQYSPVQAYLQIDEIIKIAKEHDVSMIHPGYGFLSENSEFAKKVEESGMIWVGPPAEVIDSVGDKVSARNLAIKCDVPVVPGTDGPIEDIEQAKQFVEQYGYPVIIKAAFGGGGRGMRVVREGDDIVDAFQRASSEAKSAFGNGTCFIERFLDKPKHIEVQLLADNYGNTIHLFERDCSVQRRHQKVVEIAPAKTLPVEVRNAILKDAVTLAKTANYRNAGTAEFLVDSQNRHYFIEINPRIQVEHTITEEITGVDIVAAQIQIAAGASLEQLGLLQNKITTRGFAIQCRITTEDPAKNFAPDTGKIEVYRSAGGNGVRLDGGNGFAGAVISPHYDSMLVKCSTSGSNYEIARRKMIRALVEFRIRGVKTNIPFLLALLTHPVFISGDCWTTFIDDTPSLFEMVSSKNRAQKLLAYIGDLCVNGSSIKGQIGFPKLNKEAEIPDLLDPNDEVIDVSKPSTNGLRPYLLKYGPDAFSKKVREFDGCMIMDTTWRDAHQSLLATRVRTIDLLRIAPTTSHALQNAFALECWGGATFDVAMRFLYEDPWERLRQLRKAVPNIPFQMLLRGANGVAYSSLPDNAIDHFVKQAKDNGVDIFRVFDALNDLEQLKVGVDAVKKAGGVVEATVCYSGDMLIPGKKYNLDYYLETVGKIVEMGTHILGIKDMAGTLKPKAAKLLIGSIRSKYPDLVIHVHTHDSAGTGISTYVACALAGADIVDCAINSMSGLTSQPSMSAFIAALDGDIETGVPEHFARQLDAYWAEMRLLYSCFEADLKGPDPEVYKHEIPGGQLTNLIFQAQQVGLGEQWEETKKKYEDANMLLGDIVKVTPTSKVVGDLAQFMVSNKLEKEDVEKLANELDFPDSVLDFFEGLMGTPYGGFPEPLRTNVISGKRRKLKGRPGLELEPFNLEEIRENLVSRFGPGITECDVASYNMYPKVYEQYRKVVEKYGDLSVLPTKAFLAPPTIGEEVHVEIEQGKTLIIKLLAISDLSKSHGTREVYFELNGEMRKVTIEDKTAAIETVTRAKADGHNPNEVGAPMAGVVVEVRVKHGTEVKKGDPLAVLSAMKMEMVISAPVSGRVGEVFVNEGDSVDMGDLLVKIAKDEAPAA

SEQ ID NO: 3 - protein, 1154 aa, Rhodobacter sphaeroides
MAEFRKILIANRGEIAIRVMRAANEMGKKTVAVYAEEDKLSLHRFKADEAYRIGEGLSPVGAYLSIPEIIRVAQMSGADAIHPGYGLLSENPDFVEACDAAGIAFIGPKAETMRALGDKASARRVAMAAGVPVIPATEVLGDDMEEIKRQAAEIGYPLMLKASWGGGGRGMRPITSEAELADKVREGRREAEAAFGNGEGYLEKMIQRARHVEVQILGDKYGAIYHLYERDCTVQRRNQKVVERAPAPYLTEEQRTEICELGRRICAHVNYECAGTVEFLMDMDSEKFYFIEVNPRVQVEHTVTEEVTGIDIVQSQIRIAEGATLAEATGCPSQDDIKLSGHALQCRVTTEDPQNNFIPDYGRLTAYRSATGMGIRLDGGTAYAGGVITRYYDSLLVKVTAWAPTPEKAIARMDRALREFRIRGVATNIAFVENLLKHPSFLDYSYTTKFIDTTPDLFNFKPRRDRATKILTYIADITVNGHPETAGRVRPSAELKDPKAPEPKGAPQPGTRTLLEEKGPQAVADWMAAQTRVLMTDTTMRDGHQSLLATRMRSIDMIKVTPAYAANLGGLFSVECWGGATFDVAYRFLQECPWQRLRDIRARLPNVMTQMLLRASNGVGYTNYPDNVVQEFVRQAAETGVDVFRVFDSLNWVENMRVAMDAVIEANKVCEGTICYTGDLLDPDRSKYDLNYYVGMGRALRDAGAHVLGLKDMAGLLKPAAARVLVKALKEEVGLPIHFHTHDTSGIAGATVLAACDAGVDAVDAAMDAFSGGTSQPCLGSIVEALKHTDRDTGLDIAAIREISDYWGHVRQQYSAFESGLPSPASEVYLHEMPGGQFTNLKAQARSMGLEERWSEVAQAYADANRMFGDIVKVTPSSKVVGDMALMMVAQGLTREEVEDPEVEVSFPDSVVDMLKGNLGQPHGGWPEPILKKVLKGEAPSTERPGAHLPPVDIAAAREKLLSEIKQGDDDPLDTAVDAEDLNGYLMYPKVFTDYRARHRIYGPVRTLPTRTFFYGMEPGEEISAEIDPGKTLEIRLSAVGETSDDGDAKVFFELNGQPRVIRVANRAVKAKTATRPKAQDGNPAHVGAPMPGSVASVAVSAGQKVKPGDLLVTIEAMKMETGLHADRAATVKAVHVGPGAQIEAKDLLVELED

SEQ ID NO: 4 - protein, 1154 aa, Rhizobium etli
MPISKILVANRSEIAIRVFRAANELGIKTVAIWAEEDKLALHRFKADESYQVGRGPHLARDLGPIESYLSIDEVIRVAKLSGADAIHPGYGLLSESPEFVDACNKAGIIFIGPKADTMRQLGNKVAARNLAISVGVPVVPATEPLPDDMAEVAKMAAAIGYPVMLKASWGGGGRGMRVIRSEADLAKEVTEAKREAMAAFGKDEVYLEKLVERARHVESQILGDTHGNVVHLFERDCSVQRRNQKVVERAPAPYLSEAQRQELAAYSLKIAGATNYIGAGTVEYLMDADTGKFYFIEVNPRIQVEHTVTEVVTGIDIVKAQIHILDGAAIGTPQSGVPNQEDIRLNGHALQCRVTTEDPEHNFIPDYGRITAYRSASGFGIRLDGGTSYSGAIITRYYDPLLVKVTAWAPNPLEAISRMDRALREFRIRGVATNLTFLEAIIGHPKFRDNSYTTRFIDTTPELFQQVKRQDRATKLLTYLADVTVNGHPEAKDRPKPLENAARPVVPYANGNGVKDGTKQLLDTLGPKKFGEWMRNEKRVLLTDTTMRDGHQSLLATRMRTYDIARIAGTYSHALPNLLSLECWGGATFDVSMRFLTEDPWERLALIREGAPNLLLQMLLRGANGVGYTNYPDNVVKYFVRQAAKGGIDLFRVFDCLNWVENMRVSMDAIAEENKLCEAAICYTGDILNSARPKYDLKYYTNLAVELEKAGAHIIAVKDMAGLLKPAAAKVLFKALREATGLPIHFHTHDTSGIAAATVLAAVEAGVDAVDAAMDALSGNTSQPCLGSIVEALSGSERDPGLDPAWIRRISFYWEAVRNQYAAFESDLKGPASEVYLHEMPGGQFTNLKEQARSLGLETRWHQVAQAYADANQMFGDIVKVTPSSKVVGDMALMMVSQDLTVADVVSPDREVSFPESVVSMLKGDLGQPPSGWPEALQKKALKGEKPYTVRPGSLLKEADLDAERKVIEKKLEREVSDFEFASYLMYPKVFTDFALASDTYGPVSVLPTPAYFYGLADGEELFADIEKGKTLVIVNQAVSATDSQGMVTVFFELNGQPRRIKVPDRAHGATGAAVRRKAEPGNAAHVGAPMPGVISRVFVSSGQAVNAGDVLVSIEAMKMETAIHAEKDGTIAEVLVKAGDQIDAKDLLAVYGG

SEQ ID NO: 5 - protein, 602 aa, Pseudomonas fluorescens
MTKKIFVTDTILRDAHQSLLATRMRTEDMLPICDKLDKVGYWSLECWGGATFDACVRFLKEDPWERLRQLRAALPNTRLQMLLRGQNLLGYRHYSDDVVKAFVAKAAVNGIDVFRIFDAMNDVRNLRVAIEAVKAAGKHAQGTIAYTTSPVHTIDAFVAQAKQMEAMGCDSVAIKDMAGLLTPYATGELVRALKAEQSLPVFIHSHDTAGLAAMCQLKAIENGADHIDTAISSFASGTSHPGTESMVAALKGTEFDTGLNLELLQEIGLYFYAVRKKYHQFESEFTAVDTRVQVNQVPGGMISNLANQLKEQGALNRMGEVLAEIPRVREDLGFPPLVTPTSQIVGTQAFFNVLAGERYKTITNEVKLYLQGGYGKAPGTVNEKLRRQAIGSEEVIDVRPADLLKPEMTKLRADIGALAKSEEDVLTFAMFPDIGRKFLEERAAGTLTPEVLLPIPEAGKVASAGGEGVPTEFVIDVHGETYRVDITGVGVKAEGKRHFYLSIDGMPEEVVFEPLNEFVGGGSSKRKQASAPGHVSTTMPGNIVDVLVKEGDTVKAGQAVLITEAMKMETEVQAAIAGKVTAIHVAKGDRVNPGEILIEIEG

SEQ ID NO: 6 - protein, 481 aa, Pseudomonas fluorescens
MVPPAQGNLQVITKILIANRGEIAVRIVRACAEMGIRSVAIYSDADRHALHVKRADEAHSIGAEPLAGYLNPRKLVNLAVETGCDALHPGYGFLSENAELADICAERGIKFIGPSAEVIRRMGDKTEARRSMIKAGVPVTPGTEGNVSGIEEALSEGDRIGYPVMLKATSGGGGRGIRRCNSREELEQNFPRVISEATKAFGSAEVFLEKCIVNPKHIEAQILGDSFGNVVHLFERDCSIQRRNQKLIEIAPSPQLTPEQRAYIGDLSVRAAKAVGYENAGTVEFLLAEGEVYFMEMNTRVQVEHTITEEITGIDIVREQIRIASGLPLSVKQEDIQHRGFALQFRINAEDPKNNFLPSFGKITRYYAPGGPGVRTDTAIYTGYTIPPFYDSMCLKLVVWALTWEEAMDRGLRALDDMRLQGVKTTAAYYQEILRNPEFRSGQFNTSFVESHPELTNYSIKRKPEELALAIAAAIAAHAGL

SEQ ID NO: 7 - protein, 1140 aa, Corynebacterium glutamicum
MSTHTSSTLPAFKKILVANRGEIAVRAFRAALETGAATVAIYPREDRGSFHRSFASEAVRIGTEGSPVKAYLDIDEIIGAAKKVKADAIYPGYGFLSENAQLARECAENGITFIGPTPEVLDLTGDKSRAVTAAKKAGLPVLAESTPSKNIDEIVKSAEGQTYPIFVKAVAGGGGRGMRFVASPDELRKLATEASREAEAAFGDGAVYVERAVINPQHIEVQILGDHTGEVVHLYERDCSLQRRHQKVVEIAPAQHLDPELRDRICADAVKFCRSIGYQGAGTVEFLVDEKGNHVFIEMNPRIQVEHTVTEEVTEVDLVKAQMRLAAGATLKELGLTQDKIKTHGAALQCRITTEDPNNGFRPDTGTITAYRSPGGAGVRLDGAAQLGGEITAHFDSMLVKMTCRGSDFETAVARAQRALAEFTVSGVATNIGFLRALLREEDFTSKRIATGFIADHPHLLQAPPADDEQGRILDYLADVTVNKPHGVRPKDVAAPIDKLPNIKDLPLPRGSRDRLKQLGPAAFARDLREQDALAVTDTTFRDAHQSLLATRVRSFALKPAAEAVAKLTPELLSVEAWGGATYDVAMRFLFEDPWDRLDELREAMPNVNIQMLLRGRNTVGYTPYPDSVCRAFVKEAASSGVDIFRIFDALNDVSQMRPAIDAVLETNTAVAEVAMAYSGDLSDPNEKLYTLDYYLKMAEEIVKSGAHILAIKDMAGLLRPAAVTKLVTALRREFDLPVHVHTHDTAGGQLATYFAAAQAGADAVDGASAPLSGTTSQPSLSAIVAAFAHTRRDTGLSLEAVSDLEPYWEAVRGLYLPFESGTPGPTGRVYRHEIPGGQLSNLRAQATALGLADRFELIEDNYAAVNEMLGRPTKVTPSSKVVGDLALHLVGAGVDPADFAADPQKYDIPDSVIAFLRGELGNPPGGWPEPLRTRALEGRSEGKAPLTEVPEEEQAHLDADDSKERRNSLNRLLFPKPTEEFLEHRRRFGNTSALDDREFFYGLVEGRETLIRLPDVRTPLLVRLDAISEPDDKGMRNVVANVNGQIRPMRVRDRSVESVTATAEKADSSNKGHVAAPFAGVVTVTVAEGDEVKAGDAVAIIEAMKMEATITASVDGKIDRVVVPAATKVEGGDLIVVVS

SEQ ID NO: 8 - protein, 1152 aa, Sinorhizobium meliloti
MSISKILVANRSEIAIRVFRAANELGLKTVAIWAEEDKLALHRFKADESYQVGRGPHLPRDLGPIMSYLSIDEVIRVAKLSGADAIHPGYGLLSESPEFAEACAANGITFIGPKPETMRQLGNKVAARNLAISIGVPVVPATEPLPDDPEEIKRLAEEIGYPVMLKASWGGGGRGMRAIRDPKDLIREVTEAKREAKAAFGKDEVYLEKLVERARHVESQILGDTHGNVVHLFERDCSIQRRNQKVVERAPAPYLNDAQRQELADYSLKIARATNYIGAGTVEYLMDSDTGKFYFIEVNPRIQVEHTVTEVVTGIDIVKAQIHILDGFAIGAPESGVPRQEDIRLNGHALQCRITTEDPEQNFIPDYGRITAYRGATGFGIRLDGGTAYSGAVITRYYDPLLEKVTAWAPNPGEAIQRMIRALREFRIRGVATNLTFLEAIISHPKFHDNSYTTRFIDTTPELFQQVKRQDRATKLLTYLADVTVNGHPEVKGRPKPSDDIAAPVVPFTGGDVKPGTKQRLDQLGPKKFAEWVKAQPEVLITDTTMRDGHQSLLATRMRTYDIARIAGTYARALPNLFSLECWGGATFDVSMRFLTEDPWERLAMVREGAPNLLLQMLLRGANGVGYKNYPDNVVKYFVRQAAKGGIDVFRVFDCLNWVENMRVAMDAVAEEDRICEAAICYTGDILNSARPKYDLKYYTALAAELEKAGAHMIAVKDMAGLLKPAAARVLFKALKEATGLPIHFHTHDTSGIAAATVLAAVESGVDVVDAAMDALSGNTSQPCLGSIVEALSGSERDPGLDPEWIRRISFYWEAVRHQYAAFESDLKGPASEVYLHEMPGGQFTNLKEQARSLGLETRWHEVAQAYADANRMFGDIVKVTPSSKVVGDMALMMVSQDLTVADVENPGKDIAFPESVVSMLKGDLGQPPGGWPEALQKKALKGEEPYDARPGSLLEDADLDAERKGIEEKLGREVTDFEFASYLMYPKVFTDYAVACETYGPVSVLPTPAYFYGMAPGEELFADIEKGKTLVILNQAQGEIDEKGMVKMFFEMNGQPRSIKVPDRNRGASAAVRRKAEAGNAAHLGAPMPGVISTVAVASGQSVKAGDVLLSIEAMKMETALHAEKDGVISEVLVRAGDQIDAKDLLVVFGG

SEQ ID NO: 9 - DNA, 2652 bp, Escherichia coli
atgaacgaacaatattccgcattgcgtagtaatgtcagtatgctcggcaaagtgctgggagaaaccatcaaggatgcgttgggagaacacattcttgaacgcgtagaaactatccgtaagttgtcgaaatcttcacgcgctggcaatgatgctaaccgccaggagttgctcaccaccttacaaaatttgtcgaacgacgagctgctgcccgttgcgcgtgcgtttagtcagttcctgaacctggccaacaccgccgagcaataccacagcatttcgccgaaaggcgaagctgccagcaacccggaagtgatcgcccgcaccctgcgtaaactgaaaaaccagccggaactgagcgaagacaccatcaaaaaagcagtggaatcgctgtcgctggaactggtcctcacggctcacccaaccgaaattacccgtcgtacactgatccacaaaatggtggaagtgaacgcctgtttaaaacagctcgataacaaagatatcgctgactacgaacacaaccagctgatgcgtcgcctgcgccagttgatcgcccagtcatggcataccgatgaaatccgtaagctgcgtccaagcccggtagatgaagccaaatggggctttgccgtagtggaaaacagcctgtggcaaggcgtaccaaattacctgcgcgaactgaacgaacaactggaagagaacctcggctacaaactgcccgtcgaatttgttccggtccgttttacttcgtggatgggcggcgaccgcgacggcaacccgaacgtcactgccgatatcacccgccacgtcctgctactcagccgctggaaagccaccgatttgttcctgaaagatattcaggtgctggtttctgaactgtcgatggttgaagcgacccctgaactgctggcgctggttggcgaagaaggtgccgcagaaccgtatcgctatctgatgaaaaacctgcgttctcgcctgatggcgacacaggcatggctggaagcgcgcctgaaaggcgaagaactgccaaaaccagaaggcctgctgacacaaaacgaagaactgtgggaaccgctctacgcttgctaccagtcacttcaggcgtgtggcatgggtattatcgccaacggcgatctgctcgacaccctgcgccgcgtgaaatgtttcggcgtaccgctggtccgtattgatatccgtcaggagagcacgcgtcataccgaagcgctgggcgagctgacccgctacctcggtatcggcgactacgaaagctggtcagaggccgacaaacaggcgttcctgatccgcgaactgaactccaaacgtccgcttctgccgcgcaactggcaaccaagcgccgaaacgcgcgaagtgctcgatacctgccaggtgattgccgaagcaccgcaaggctccattgccgcctacgtgatctcgatggcgaaaacgccgtccgacgtactggctgtccacctgctgctgaaagaagcgggtatcgggtttgcgatgccggttgctccgctgtttgaaaccctcgatgatctgaacaacgccaacgatgtcatgacccagctgctcaatattgactggtatcgtggcctgattcagggcaaacagatggtgatgattggctattccgactcagcaaaagatgcgggagtgatggcagcttcctgggcgcaatatcaggcacaggatgcattaatcaaaacctgcgaaaaagcgggtattgagctgacgttgttccacggtcgcggcggttccattggtcgcggcggcgcacctgctcatgcggcgctgctgtcacaaccgccaggaagcctgaaaggcggcctgcgcgtaaccgaacagggcgagatgatccgctttaaatatggtctgccagaaatcaccgtcagcagcctgtcgctttataccggggcgattctggaagccaacctgctgccaccgccggagccgaaagagagctggcgtcgcattatggatgaactgtcagtcatctcctgcgatgtctaccgcggctacgtacgtgaaaacaaagattttgtgccttacttccgctccgctacgccggaacaagaactgggcaaactgccgttgggttcacgtccggcgaaacgtcgcccaaccggcggcgtcgagtcactacgcgccattccgtggatcttcgcctggacgcaaaaccgtctgatgctccccgcctggctgggtgcaggtacggcgctgcaaaaagtggtcgaagacggcaaacagagcgagctggaggctatgtgccgcgattggccattcttctcgacgcgtctcggcatgctggagatggtcttcgccaaagcagacctgtggctggcggaatactatgaccaacgcctggtagacaaagcactgtggccgttaggtaaagagttacgcaacctgcaagaagaagacatcaaagtggtgctggcgattgccaacgattcccatctgatggccgatctgccgtggattgcagagtctattcagctacggaatatttacaccgacccgctgaacgtattgcaggccgagttgctgcaccgctcccgccaggcagaaaaagaaggccaggaaccggatcctcgcgtcgaacaagcgttaatggtcactattgccgggattgcggcaggtatgcgtaataccggctaa

SEQ ID NO: 10 - protein, 883 aa, Escherichia coli
MNEQYSALRSNVSMLGKVLGETIKDALGEHILERVETIRKLSKSSRAGNDANRQELLTTLQNLSNDELLPVARAFSQFLNLANTAEQYHSISPKGEAASNPEVIARTLRKLKNQPELSEDTIKKAVESLSLELVLTAHPTEITRRTLIHKMVEVNACLKQLDNKDIADYEHNQLMRRLRQLIAQSWHTDEIRKLRPSPVDEAKWGFAVVENSLWQGVPNYLRELNEQLEENLGYKLPVEFVPVRFTSWMGGDRDGNPNVTADITRHVLLLSRWKATDLFLKDIQVLVSELSMVEATPELLALVGEEGAAEPYRYLMKNLRSRLMATQAWLEARLKGEELPKPEGLLTQNEELWEPLYACYQSLQACGMGIIANGDLLDTLRRVKCFGVPLVRIDIRQESTRHTEALGELTRYLGIGDYESWSEADKQAFLIRELNSKRPLLPRNWQPSAETREVLDTCQVIAEAPQGSIAAYVISMAKTPSDVLAVHLLLKEAGIGFAMPVAPLFETLDDLNNANDVMTQLLNIDWYRGLIQGKQMVMIGYSDSAKDAGVMAASWAQYQAQDALIKTCEKAGIELTLFHGRGGSIGRGGAPAHAALLSQPPGSLKGGLRVTEQGEMIRFKYGLPEITVSSLSLYTGAILEANLLPPPEPKESWRRIMDELSVISCDVYRGYVRENKDFVPYFRSATPEQELGKLPLGSRPAKRRPTGGVESLRAIPWIFAWTQNRLMLPAWLGAGTALQKVVEDGKQSELEAMCRDWPFFSTRLGMLEMVFAKADLWLAEYYDQRLVDKALWPLGKELRNLQEEDIKVVLAIANDSHLMADLPWIAESIQLRNIYTDPLNVLQAELLHRSRQAEKEGQEPDPRVEQALMVTIAGIAAGMRNTG

SEQ ID NO: 11 - protein, 483 aa, Methanobacterium thermoautotrophicum
MKVPRCMSTQHPDNVNPPFFAEEPELGGEDEIREAYYVFSHLGCDEQMWDCEGKEVDNYVVKKLLTKYQAFFRDHVLGEDLRLTLRVPNPTVERAEAKILLETLESIPRSYDTASLFYGMDAAPVFEVILPMTSSSSCLNRIHSYYLDFVKGKERLQLADGVTVKEWIGEFRPDEINVIPLFEDHEGMLNAAKITGEYLDGKDIQEQRVFLARSDPAMNYGMISATLLNRIALSDFRDLEEESGVKLYPIIGMGSAPFRGNLRPDNVEDVTWEYRGAYTFTVQSSFKYDHEPSDVIRGIKKLRSVKPGRAAEIERESVLEIISAYCREYRRQVMDLVDIINRVARYVPGRRKRKLHIGLFGYSRSMGNVSLPRAITFTAALYSLGVPPELLGFNALSSGDLEFIEEVYPGLGRDLHDAARYANPESPFLSPEVKSSFEEYLEPEYDEGHMKTTEEIIRALRINRTANLQELILEAASQRKFLG

SEQ ID NO: 12 - protein, 537 aa, Clostridium perfringens
MKIPCSMMTQHPDNVETYISIQQEPAEAIKGLTPQDKGGLGIEEVMIDFEGKLTPYHQTSQIALGLISNGIIPGKDVRVTPRIPNANKESVFRQLMSIMSIIETNVQSKELTGTPAISEVVVPMIETGKEISEFQDRVNSVVDMGNKNYKTKLDLNSVRIIPLVEDVPALANIDRILDEHYEIEKSKGHILKDLRIMIARSDTAMSYGLISGVLSVLMAVDGAYKWGEKHGVTISPILGCGSLPFRGHFSEENIDEILATYSGIKTFTFQSALRYDHGEEATKHAVRELKEKIAQSKPRNFSEEDKDLMKEFIGICSKHYLQTFLKVIDTVSFVSDFIPKNRDRLTKAKTGLEYNREVANLDNVADLVKDEVLKQEILSIDNSKEYAVPRAISFTGAMYTLGMPPELMGMGRALNEIKTKYGQEGIDKLLEIYPILRKDLAFAARFANGGVSKKIIDEEARQEYKEDMKYVNEILNLGLDYDFLNENEFYHTLLKTTKPIIMHLMGLEENVMRNSTEELKILNEWIVRMGKVRGSIG

SEQ ID NO: 13 - DNA, 1260 bp, Issatchenkia orientalis
atgtccagaggcttctttactgagaacattacgcaattgccaccagaccctttgtttggtcttaaggccaggttcagcaatgactcacgtgaaaacaaggtcgatttaggtattggggcatatagggacgacaacggtaagccatggatcttaccatctgtcaggttggccgaaaacttgattcagaactccccagactacaaccatgagtacctaccaatcggtggacttgctgatttcacttctgctgcggcaagagttgtatttggaggcgattctaaagccatttcgcaaaaccgtcttgtctccatccagagtttgtcaggtacaggtgccttacatgttgctggtctatttatcaagcgccaatacaagtctcttgatggcacttccgaagaccctctaatatatctatcggaacctacatgggccaaccacgttcaaatctttgaagttattggtctcaagcctgtattctatccatattggcatgccgcaagcaagaccttggatctgaagggctacttaaaggcaataaacgatgctccagaagggtcggtttttgtattgcatgcaacggctcataaccctactggtttggatccaacacaagaacaatggatggagattttggccgctataagtgccaaaaagcatctgccattatttgattgtgcatatcagggtttcacctccgggtctctagatagagatgcttgggctgttcgagaagctgtcaacaatgacaagtacgaattcccgggaattattgtctgtcaatcgtttgcgaaaaatgttggcatgtatggtgaacggattggtgcagttcatattgttctacctgaatcagacgcttccctaaacagcgccatcttctcccaattgcaaaagacaatcagatcggagatttccaatccaccaggatacggtgcaaagattgtgtctaaagttttgaacactccggaactttacaaacagtgggagcaagatttgatcaccatgtcttcgagaatcactgcaatgagaaaggagctagtaaatgagctcgagcgtcttggaacccctggcacttggagacacatcaccgagcaacagggtatgttttcctttactggtttgaacccggagcaggttgccaagctagagaaggagcatggtgtttatcttgttcgtagtggacgtgcaagtattgcaggcctcaacatgggaaacgtcaagtatgttgccaaggccattgactctgtcgtgagagacctttag

SEQ ID NO: 14 - protein, 419 aa, Issatchenkia orientalis
MSRGFFTENITQLPPDPLFGLKARFSNDSRENKVDLGIGAYRDDNGKPWILPSVRLAENLIQNSPDYNHEYLPIGGLADFTSAAARVVFGGDSKAISQNRLVSIQSLSGTGALHVAGLFIKRQYKSLDGTSEDPLIYLSEPTWANHVQIFEVIGLKPVFYPYWHAASKTLDLKGYLKAINDAPEGSVFVLHATAHNPTGLDPTQEQWMEILAAISAKKHLPLFDCAYQGFTSGSLDRDAWAVREAVNNDKYEFPGIIVCQSFAKNVGMYGERIGAVHIVLPESDASLNSAIFSQLQKTIRSEISNPPGYGAKIVSKVLNTPELYKQWEQDLITMSSRITAMRKELVNELERLGTPGTWRHITEQQGMFSFTGLNPEQVAKLEKEHGVYLVRSGRASIAGLNMGNVKYVAKAIDSVVRDL

SEQ ID NO: 15 - protein, 418 aa, Saccharomyces cerevisiae
MSATLFNNIELLPPDALFGIKQRYGQDQRATKVDLGIGAYRDDNGKPWVLPSVKAAEKLIHNDSSYNHEYLGITGLPSLTSNAAKIIFGTQSDAFQEDRVISVQSLSGTGALHISAKFFSKFFPDKLVYLSKPTWANHMAIFENQGLKTATYPYWANETKSLDLNGFLNAIQKAPEGSIFVLHSCAHNPTGLDPTSEQWVQIVDAIASKNHIALFDTAYQGFATGDLDKDAYAVRLGVEKLSTVSPVFVCQSFAKNAGMYGERVGCFHLALTKQAQNKTIKPAVTSQLAKIIRSEVSNPPAYGAKIVAKLLETPELTEQWHKDMVTMSSRITKMRHALRDHLVKLGTPGNWDHIVNQCGMFSFTGLTPQMVKRLEETHAVYLVASGRASIAGLNQGNVEYVAKAIDEVVRFYTIEAKL

SEQ ID NO: 16 - protein, 396 aa, Escherichia coli
MFENITAAPADPILGLADLFRADERPGKINLGIGVYKDETGKTPVLTSVKKAEQYLLENETTKNYLGIDGIPEFGRCTQELLFGKGSALINDKRARTAQTPGGTGALRVAADFLAKNTSVKRVWVSNPSWPNHKSVFNSAGLEVREYAYYDAENHTLDFDALINSLNEAQAGDVVLFHGCCHNPTGIDPTLEQWQTLAQLSVEKGWLPLFDFAYQGFARGLEEDAEGLRAFAAMHKELIVASSYSKNFGLYNERVGACTLVAADSETVDRAFSQMKAAIRANYSNPPAHGASVVATILSNDALRAIWEQELTDMRQRIQRMRQLFVNTLQEKGANRDFSFIIKQNGMFSFSGLTKEQVLRLREEFGVYAVASGRVNVAGMTPDNMAPLCEAIVAVL

SEQ ID NO: 17 - protein, 139 aa, Streptomyces avermitilis
MLRTMFKSKIHRATVTQADLHYVGSVTIDADLLDAADLLPGELVHIVDITNGARLETYVIEGERGSGVVGINGAAAHLVHPGDLVIIISYAQVSDAEARALRPRVVHVDRDNRVVALGADPAEPVPGSDQARSPQAVTA

SEQ ID NO: 18 - protein, 127 aa, Clostridium acetobutylicum
MHLNMLKSKIHRATVVQADLNYVGSITIDRNLMDKANILEYEKVEIANINNGARFETYVIAGEAGSGIICLNGAAARCAQAGDKVIIMCYCSLTPEEASEHRPKVVFVNDDNSISNVTEYEKHGTIG

SEQ ID NO: 19 - DNA, 1404 bp, Issatchenkia orientalis
atgtctattagtgaaaaatattttcctcaagaacctcaatctcctgaattgaaaactgcaattccaggtcctcaatcaaaggcaaagctcgaggaattatctgctgtctatgatacaaaggctgcatattttgttaccgactactacaaatctcttggtaactatattgtggatgcagatggcaacaagctactagattcttattgccaaatctcttctatcgcattgggttacaataatccagcattattaaaagtagcacattctgatgaaatgacagttgctttatgtaacagacctgctttggcatgttttccatccactgattactatgaaatactaaagaagggattgttgtccgttgctccaaagggattagataaggtttgtactgcacacacgggatctgatgccaatgaaatggcatttaaggctgcatttttgtttcaagcaagtaagaagagaggtgacaaaccatttaccagcgaagagctggaatctgtcatggagaacaagttgccaggcacctctgacatggttatcctgtcatttgaaaaagggttccatggtagattgtttggatctttatctaccactagatctaaagctattcacaaactggatattcctgcgtttgaatggccaaaggctccattccctcagttaaagtatcctctggatcaattccaagctgaaaacaaagcagaagaagaaagatgtttgaaggctttagaggaaattattgtcaactctcctgccaaaattgcagctgcaatcattgaaccggtccaatctgaaggtggtgataatcatgcttcaccagaattcttccaaggtattagagaaatcaccaaaaagcacggtgtcattcttattgttgatgaagttcaaacaggaggtggtgcttctggtaagatgtggttacatgaacactatggcattgtcccagacatcatgactttttctaaaaaaatgcaaaatgcaggtttctttttcagtgaagcaggtcttgctggggaccaaccattcagacaattcaatacctggtgcggtgatccatcaaaagctctaattgcaagaaccataattgaagaaattaaagataagaacctattgactagtgttaccgaaacaggtgactacctatattcaaagctcgaagcaatttcagcaaagtatgacaaaatgatcaacttgagaggtaagggaagaggtttctttattgcatttgatgccccaacaccggagttaagaaacaaatttattgctgaatgtaagaaattaggtttaaacattggtggatgcggtgaacaaggtgttagattgagacctgcattagtttttgaaaagaagcatgctgatatcttagcctccattattgatcaagctttttccaaaatttaa

SEQ ID NO: 20 - protein, 467 aa, Issatchenkia orientalis
MSISEKYFPQEPQSPELKTAIPGPQSKAKLEELSAVYDTKAAYFVTDYYKSLGNYIVDADGNKLLDSYCQISSIALGYNNPALLKVAHSDEMTVALCNRPALACFPSTDYYEILKKGLLSVAPKGLDKVCTAHTGSDANEMAFKAAFLFQASKKRGDKPFTSEELESVMENKLPGTSDMVILSFEKGFHGRLFGSLSTTRSKAIHKLDIPAFEWPKAPFPQLKYPLDQFQAENKAEEERCLKALEEIIVNSPAKIAAAIIEPVQSEGGDNHASPEFFQGIREITKKHGVILIVDEVQTGGGASGKMWLHEHYGIVPDIMTFSKKMQNAGFFFSEAGLAGDQPFRQFNTWCGDPSKALIARTIIEEIKDKNLLTSVTETGDYLYSKLEAISAKYDKMINLRGKGRGFFIAFDAPTPELRNKFIAECKKLGLNIGGCGEQGVRLRPALVFEKKHADILASIIDQAFSKI

SEQ ID NO: 21 - protein, 475 aa, Saccharomyces kluyveri
MPSYSVAELYYPDEPTEPKISTSSYPGPKAKQELEKLSNVFDTRAAYLLADYYKSRGNYIVDQDGNVLLDVYAQISSIALGYNNPEILKVAKSDAMSVALANRPALACFPSNDYGQLLEDGLLKAAPQGQDKIWTALSGSDANETAFKACFMYQAAKKRNGRSFSTEELESVMDNQLPGTSEMVICSFEKGFHGRLFGSLSTTRSKPIHKLDIPAFNWPKAPFPDLKYPLEENKEANKAEESSCIEKFSQIVQEWQGKIAAVIIEPIQSEGGDNHASSDFFQKLREITIENGILMIVDEVQTGVGATGKMWAHEHWNLSNPPDLVTFSKKFQAAGFYYHDPKLQPDQPFRQFNTWCGDPSKALIAKVIYEEIVKHDLVTRTAEVGNYLFNRLEKLFEGKNYIQNLRGKGQGTYIAFDFGTSSERDSFLSRLRCNGANVAGCGDSAVRLRPSLTFEEKHADVLVSIFDKTLRQLYG

SEQ ID NO: 22 - protein, 451 aa, Streptomyces avermitilis
MTPQPNPQVGAAVKAADRAHVFHSWSAQELIDPLAVAGAEGSYFWDYDGRRYLDFTSGLVFTNIGYQHPKVVAAIQEQAASLTTFAPAFAVEARSEAARLIAERTPGDLDKIFFTNGGADAIEHAVRMARIHTGRPKVLSAYRSYHGGTQQAVNITGDPRRWASDSASAGVVHFWAPYLYRSRFYAETEQQECERALEHLETTIAFEGPGTIAAIVLETVPGTAGIMVPPPGYLAGVRELCDKYGIVFVLDEVMAGFGRTGEWFAADLFDVTPDLMTFAKGVNSGYVPLGGVAISGKIAETFGKRAYPGGLTYSGHPLACAAAVATINVMAEEGVVENAANLGARVIEPGLRELAERHPSVGEVRGVGMFWALELVKDRETREPLVPYNAAGEANAPMAAFGAAAKANGLWPFINMNRTHVVPPCNVTEAEAKEGLAALDAALSVADEYTV

SEQ ID NO: 23 - protein, 419 aa, Streptomyces avermitilis
MSALSPHLRQATPVVAVRGEGVHLYGEDGRRYLDFTAGIGVTSTGHCHPRVVAAAQEQAGTLVHGQYTTVLHPPLRRLVDRLGEVLPAGLDSLFFTNSGSEAVEAALRLARQATGRPNVLVCHGGFHGRTVAAAAMTTSGTRFRSGFSPLMSGVVVTPFPTAFRYGWDEETATRFALQELDYTLRTISSPDDTAAIIVEPVLGEGGYVPATRAFLEGLRERADRHGFVLILDEVQTGVGRTGRFWGHDHFGVTPDILITAKGLASGFPLSGIAASAELMGKAWPGSQGGTYGANAVACAAACATLDVVRDEKLVDNAEAMGARLRAGLAAVAATTPAIGDVRGLGLMLASEFVTEDGGPDPETAARVQRAAVDEGLLLLLCGAWNQVVRMIPALVIDEAEVDEGLRAWSAAVEVGVPAR

SEQ ID NO: 24 - protein, 471 aa, Saccharomyces cerevisiae
MSICEQYYPEEPTKPTVKTESIPGPESQKQLKELGEVFDTRPAYFLADYEKSLGNYITDVDGNTYLDLYAQISSIALGYNNPALIKAAQSPEMIRALVDRPALGNFPSKDLDKILKQILKSAPKGQDHVWSGLSGADANELAFKAAFIYYRAKQRGYDADFSEKENLSVMDNDAPGAPHLAVLSFKRAFHGRLFASGSTTCSKPIHKLDFPAFHWPHAEYPSYQYPLDENSDANRKEDDHCLAIVEELIKTWSIPVAALIIEPIQSEGGDNHASKYFLQKLRDITLKYNVVYIIDEVQTGVGATGKLWCHEYADIQPPVDLVTFSKKFQSAGYFFHDPKFIPNKPYRQFNTWCGEPARMIIAGAIGQEISDKKLTEQCSRVGDYLFKKLEGLQKKYPENFQNLRGKGRGTFIAWDLPTGEKRDLLLKKLKLNGCNVGGCAVHAVRLRPSLTFEEKHADIFIEALAKSVNEL

SEQ ID NO: 25 - DNA, 813 bp, Issatchenkia orientalis
atgtttggtaatatttcccaaagacttgcaggcaagaacatcctaattacaggtgcgtccactggtatcggataccatacagcaaagtattttgcagaagctgcaaatggagacttgaagttggttttggctgcaagaagaaaggagaagctggaggcactaaaggcagacttgcttgccaagtatccatccatcaaagtccatattgagagtttggatgtctccaaaacggaaaccattgcacctttcttaaaaggtttacctgaggaattttcaattgtcgacgtgttggtcaacaatgcaggtaaggcgcttggtttggatccaattggctctgtcgatccaaaggacgtggatgaaatgttccagaccaatgttttgggtatgattcaattgacccagttggttgtacagcaaatgaaggagagaaactccggggacattgtccaactaggttcagtggctggtagaaacccatacccaggtggtggtatctactgtgcctccaaggccgcattgagatcttttacacatgtattgagagaggaattgattaataccaagattagagtgattgaaatcgagcctggaaatgttgcaactgaggaattttctttgaccagattcaaaggtgataagtccaaggccgaaaaggtctatgagggaaccgagccattgtatggtaccgatattgcagaattgattctatttgcagtttctagacctcaaaacactgttattgcagaaacacttgtttttgctagtaaccaagcttctgcttaccatattttcagaggatcattagataaatag

SEQ ID NO: 26 - protein, 270 aa, Issatchenkia orientalis
MFGNISQRLAGKNILITGASTGIGYHTAKYFAEAANGDLKLVLAARRKEKLEALKADLLAKYPSIKVHIESLDVSKTETIAPFLKGLPEEFSIVDVLVNNAGKALGLDPIGSVDPKDVDEMFQTNVLGMIQLTQLVVQQMKERNSGDIVQLGSVAGRNPYPGGGIYCASKAALRSFTHVLREELINTKIRVIEIEPGNVATEEFSLTRFKGDKSKAEKVYEGTEPLYGTDIAELILFAVSRPQNTVIAETLVFASNQASAYHIFRGSLDK

SEQ ID NO: 27 - protein, 248 aa, Escherichia coli
MIVLVTGATAGFGECITRRFIQQGHKVIATGRRQERLQELKDELGDNLYIAQLDVRNRAAIEEMLASLPAEWCNIDILVNNAGLALGMEPAHKASVEDWETMIDTNNKGLVYMTRAVLPGMVERNHGHIINIGSTAGSWPYAGGNVYGATKAFVRQFSLNLRTDLHGTAVRVTDIEPGLVGGTEFSNVRFKGDDGKAEKTYQNTVALTPEDVSEAVWWVSTLPAHVNINTLEMMPVTQSYAGLNVHRQ

SEQ ID NO: 28 - protein, 298 aa, Alcaligenes faecalis
MSNTIAFIGLGHMGKPMALNLLKAGHSLNVFDLNAQAMQELQAAGAQVGESAVQIAQDAQMVFTMLPAGRHVRQVYEGENGLLQTVAPGTVLVDCSTIDAQTSQDLAAKASKLGLFMLDAPVSGGTGGAIAGTLTFMVGGEDQALEKARPYLDAMGKNIFHAGKAGAGQVAKICNNMLLGILMAGTAEALALGVAHGLDPAVLSTIMARSSGRNWATELYNPWPGVMPDVPASRDYQGGFATGLMLKDLGLAADAAVSQNSATPLGELARNLFALHAAQGQNAGLDFSSILNLYRQKH

SEQ ID NO: 29 - protein, 314 aa, Metallosphaera sedula
MTEKVSVVGAGVIGVGWATLFASKGYSVSLYTEKKETLDKGIEKLRNYVQVMKNNSQITEDVNTVISRVSPTTNLDEAVRGANFVIEAVIEDYDAKKKIFGYLDSVLDKEVILASSTSGLLITEVQKAMSKHPERAVIAHPWNPPHLLPLVEIVPGEKTSMEVVERTKSLMEKLDRIVVVLKKEIPGFIGNRLAFALFREAVYLVDEGVATVEDIDKVMTAAIGLRWAFMGPFLTYHLGGGEGGLEYFFNRGFGYGANEWMHTLAKYDKFPYTGVTKAIQQMKEYSFIKGKTFQEISKWRDEKLLKVYKLVWEK

SEQ ID NO: 30 - protein, 295 aa, Pseudomonas putida
MRIAFIGLGNMGAPMARNLIKAGHQLNLFDLNKAVLAELAELGGQISPSPKDAAANSELVITMLPAAAHVRSVYLNEDGVLAGIRPGTPTVDCSTIDPQTARDVSKAAAAKGVDMGDAPVSGGTGGAAAGTLTFMVGASTELFASLKPVLEQMGRNIVHCGEVGTGQIAKICNNLLLGISMIGVSEAMALGNALGIDTKVLAGIINSSTGRCWSSDTYNPWPGIIETAPASRGYTGGFGAELMLKDLGLATEAARQAHQPVILGAVAQQLYQAMSLRGEGGKDFSAIVEGYRKKD

SEQ ID NO: 31 - protein, 295 aa, Pseudomonas putida
MRIAFIGLGNMGAPMARNLIKAGHQLNLFDLNKTVLAELAELGGQISPSPKDAAASSELVITMLPAAAHVRSVYLNDDGVLAGIRPGTPTVDCSTIDPQTARDVSKAAAAKGVDMGDAPVSGGTGGAAAGTLTFMVGASAELFASLKPVLEQMGRNIVHCGEVGTGQIAKICNNLLLGISMIGVSEAMALGNALGIDTKVLAGIINSSTGRCWSSDTYNPWPGIIETAPASRGYTGGFGAELMLKDLGLATEAARQAHQPVILGAVAQQLYQAMSLRGEGGKDFSAIVEGYRKKD

SEQ ID NO: 32 - protein, 298 aa, Pseudomonas aeruginosa
MTDIAFLGLGNMGGPMAANLLKAGHRVNVFDLQPKAVLGLVEQGAQGADSALQCCEGAEVVISMLPAGQHVESLYLGDDGLLARVAGKPLLIDCSTIAPETARKVAEAAAAKGLTLLDAPVSGGVGGARAGTLSFIVGGPAEGFARARPVLENMGRNIFHAGDHGAGQVAKICNNMLLGILMAGTAEALALGVKNGLDPAVLSEVMKQSSGGNWALNLYNPWPGVMPQAPASNGYAGGFQVRLMNKDLGLALANAQAVQASTPLGALARNLFSLHAQADAEHEGLDFSSIQKLYRGKD

SEQ ID NO: 33 - protein, 382 aa, Ralstonia eutropha
MAFIYYLTHIHLDFGAVSLLKSECERIGIRRPLLVTDKGVVAAGVAQRAIDAMQGLQVAVFDETPSNPTEAMVRKAAAQYREAGCDGLVAVGGGSSIDLAKGIAILATHEGELTTYATIEGGSARITDKAAPLIAVPTTSGTGSEVARGAIIILDDGRKLGFHSWHLLPKSAVCDPELTLGLPAGLTAATGMDAIAHCIETFLAPAFNPPADGIALDGLERGWGHIERATRDGQDRDARLNMMSASMQGAMAFQKGLGCVHSLSHPLGGLKIDGRTGLHHGTLNAVVMPAVLRFNADAPTVVRDDRYARLRRAMHLPDGADIAQAVHDMTVRLGLPTGLRQMGVTEDMFDKVIAGALVDHCHKTNPKEASAADYRRMLEQSM

SEQ ID NO: 34 - protein, 371 aa, Clostridium kluyveri
MKLLKLAPDVYKFDTAEEFMKYFKVGKGDFILTNEFLYKPFLEKFNDGADAVFQEKYGLGEPSDEMINNIIKDIGDKQYNRIIAVGGGSVIDIAKILSLKYTDDSLDLFEGKVPLVKNKELIIVPTTCGTGSEVTNVSVAELKRRHTKKGIASDELYATYAVLVPEFIKGLPYKFFVTSSVDALIHATEAYVSPNANPYTDMFSVKAMELILNGYMQMVEKGNDYRVEIIEDFVIGSNYAGIAFGNAGVGAVHALSYPIGGNYHVPHGEANYLFFTEIFKTYYEKNPNGKIKDVNKLLAGILKCDESEAYDSLSQLLDKLLSRKPLREYGMKEEEIETFADSVIEGQQRLLVNNYEPFSREDIVNTYKKLY

SEQ ID NO: 35 - protein, 538 aa, Mannheimia succiniciproducens
MTDLNQLTQELGALGIHDVQEVVYNPSYELLFAEETKPGLEGYEKGTVTNQGAVAVNTGIFTGRSPKDKYIVLDDKTKDTVWWTSEKVKNDNKPMSQDTWNSLKGLVADQLSGKRLFVVDAFCGANKDTRLAVRVVTEVAWQAHFVTNMFIRPSAEELKGFKPDFVVMNGAKCTNPNWKEQGLNSENFVAFNITEGVQLIGGTWYGGEMKKGMFSMMNYFLPLRGIASMHCSANVGKDGDTAIFFGLSGTGKTTLSTDPKRQLIGDDEHGWDDEGVFNFEGGCYAKTINLSAENEPDIYGAIKRDALLENVVVLDNGDVDYADGSKTENTRVSYPIYHIQNIVKPVSKAGPATKVIFLSADAFGVLPPVSKLTPEQTKYYFLSGFTAKLAGTERGITEPTPTFSACFGAAFLSLHPTQYAEVLVKRMQESGAEAYLVNTGWNGTGKRISIKDTRGIIDAILDGSIDKAEMGSLPIFDFSIPKALPGVNPAILDPRDTYADKAQWEEKAQDLAGRFVKNFEKYTGTAEGQALVAAGPKA

SEQ ID NO: 36 - protein, 532 aa, Anaerobiospirillum succiniciproducens
MSLSESLAKYGITGATNIVHNPSHEELFAAETQASLEGFEKGTVTEMGAVNVMTGVYTGRSPKDKFIVKNEASKEIWWTSDEFKNDNKPVTEEAWAQLKALAGKELSNKPLYVVDLFCGANENTRLKIRFVMEVAWQAHFVTNMFIRPTEEELKGFEPDFVVLNASKAKVENFKELGLNSETAVVFNLAEKMQIILNTWYGGEMKKGMFSMMNFYLPLQGIAAMHCSANTDLEGKNTAIFFGLSGTGKTTLSTDPKRLLIGDDEHGWDDDGVFNFEGGCYAKVINLSKENEPDIWGAIKRNALLENVTVDANGKVDFADKSVTENTRVSYPIFHIKNIVKPVSKAPAAKRVIFLSADAFGVLPPVSILSKEQTKYYFLSGFTAKLAGTERGITEPTPTFSSCFGAAFLTLPPTKYAEVLVKRMEASGAKAYLVNTGWNGTGKRISIKDTRGIIDAILDGSIDTANTATIPYFNFTVPTELKGVDTKILDPRNTYADASEWEVKAKDLAERFQKNFKKFESLGGDLVKAGPQL

SEQ ID NO: 37 - protein, 538 aa, Actinobacillus succinogenes
MTDLNKLVKELNDLGLTDVKEIVYNPSYEQLFEEETKPGLEGFDKGTLTTLGAVAVDTGIFTGRSPKDKYIVCDETTKDTVWWNSEAAKNDNKPMTQETWKSLRELVAKQLSGKRLFVVEGYCGASEKHRIGVRMVTEVAWQAHFVKNMFIRPTDEELKNFKADFTVLNGAKCTNPNWKEQGLNSENFVAFNITEGIQLIGGTWYGGEMKKGMFSMMNYFLPLKGVASMHCSANVGKDGDVAIFFGLSGTGKTTLSTDPKRQLIGDDEHGWDESGVFNFEGGCYAKTINLSQENEPDIYGAIRRDALLENVVVRADGSVDFDDGSKTENTRVSYPIYHIDNIVRPVSKAGHATKVIFLTADAFGVLPPVSKLTPEQTEYYFLSGFTAKLAGTERGVTEPTPTFSACFGAAFLSLHPIQYADVLVERMKASGAEAYLVNTGWNGTGKRISIKDTRGIIDAILDGSIEKAEMGELPIFNLAIPKALPGVDPAILDPRDTYADKAQWQVKAEDLANRFVKNFVKYTANPEAAKLVGAGPKA

SEQ ID NO: 38 - protein, 618 aa, Ralstonia eutropha
MNHPSMQGTTALNVPAWVRNQKLVAWVAEIAALTKPERIHWCDGSQEEYDRLCEQMVAAGTLKRLNPAKRKNSYLALSDPSDVARVEDRTFICSQKKEDAGPTNNWVAPAEMRTTLNGLFDGCMRGRTLYVVPFSMGPLGSPIAHIGVELSDSPYVAVNMRIMTRMGKAVYDVLGTDGDFVPCVHTVGKPLAAGEKDVPWPCNPTKYIVHFPESREIWSFGSGYGGNALLGKKCFALRIASTMGRDEGWLAEHMLILGVTSPEGKKFHVAAAFPSACGKTNFAMLIPPKGFEGWKVTTIGDDIAWIKPGKDGRLYAINPEAGYFGVAPGTSEKTNFNAMATLKENVIFTNVALTDDGDVWWEGMTKEAPAHLTDWQGKDWTPEIAKATGAKAAHPNARFTAPASQCPSIDENWDNPAGVPIDAFIFGGRRSTTVPLVTEARNWTEGVYMAATMGSETTAAAAGQQGVVRRDPFAMLPFCGYNMSDYFGHWLALGQKLEAAGAKLPKIYCVNWFRKDADGNFVWPGFGENMRVLSWMIDRVEGKGEGAEHVFGTSPRYEDLNWSGVEFSVAQFTQVTSIDADAWKQELALHDELFTQLKHNLPQALAEARAALGKRLEG

SEQ ID NO: 39 - protein, 540 aa, Escherichia coli
MRVNNGLTPQELEAYGISDVHDIVYNPSYDLLYQEELDPSLTGYERGVLTNLGAVAVDTGIFTGRSPKDKYIVRDDTTRDTFWWADKGKGKNDNKPLSPETWQHLKGLVTRQLSGKRLFVVDAFCGANPDTRLSVRFITEVAWQAHFVKNMFIRPSDEELAGFKPDFIVMNGAKCTNPQWKEQGLNSENFVAFNLTERMQLIGGTWYGGEMKKGMFSMMNYLLPLKGIASMHCSANVGEKGDVAVFFGLSGTGKTTLSTDPKRRLIGDDEHGWDDDGVFNFEGGCYAKTIKLSKEAEPEIYNAIRRDALLENVTVREDGTIDFDDGSKTENTRVSYPIYHIDNIVKPVSKAGHATKVIFLTADAFGVLPPVSRLTADQTQYHFLSGFTAKLAGTERGITEPTPTFSACFGAAFLSLHPTQYAEVLVKRMQAAGAQAYLVNTGWNGTGKRISIKDTRAIIDAILNGSLDNAETFTLPMFNLAIPTELPGVDTKILDPRNTYASPEQWQEKAETLAKLFIDNFDKYTDTPAGAALVAAGPKL

SEQ ID NO: 40 - protein, 236 aa, Lactococcus lactis
MSEITQLFQYNTLGALMAGLYEGTMTIGELLKHGDLGIGTLDSIDGELIVLDGKAYQAKGDKTIVELTDDIKVPYAAVVPHQAEVVFKQKFTVSDKELEDRIESYFDGQNLFRSIKITGKFPKMHVRMIPRAKSGTKFVEVSQNQPEYTEENIKGTIVGIWTPEMFHGVSVAGYHLHFISEDFTFGGHVLDFIIDNGTVEIGAIDQLNQSFPVQDRKFLFADLDIEALKKDIDVAE

SEQ ID NO: 41 - protein, 239 aa, Streptococcus thermophilus
MSEAIKLFQYNTLGALMAGLYGGTLTVGELLEHGDLGLGTLDSIDGELIVLDGKAYQAKGSEGKVEVVEVSPDEKVPYAAVVPHQAEVIFRQRYEMTDKELEDRIESYYDGVNLFRSIKIKGHFKHMHVRMIPKSNADIKFADVATRQPEYEVDDISGTIVGIWTPEMFHGVSVAGYHLHFISDDLTFGGHVMDFVIENGIIEVGPVDQLDQRFPVQDRQYLFAKFNVDEMRKDITKAE

SEQ ID NO: 42 - protein, 285 aa, Brevibacillus brevis
MKKNIITSITSLALVAGLSLTAFAATTATVPAPPAKQESKPAVAANPAPKNVLFQYSTINALMLGQFEGDLTLKDLKLRGDMGLGTINDLDGEMIQMGTKFYQIDSTGKLSELPESVKTPFAVTTHFEPKEKTTLTNVQDYNQLTKMLEEKFENKNVFYAVKLTGTFKMVKARTVPKQTRPYPQLTEVTKKQSEFEFKNVKGTLIGFYTPNYAAALNVPGFHLHFITEDKTSGGHVLNLQFDNANLEISPIHEFDVQLPHTDDFAHSDLTQVTTSQVHQAESERK

SEQ ID NO: 43 - protein, 259 aa, Enterobacter aerogenes
MMMHSSACDCEASLCETLRGFSAQHPDSVIYQTSLMSALLSGVYVGETTIADLLAHGDFGLGTFNELDGEMIAFSSQVYQLRADGSARAAKPEQKTPFAVMTWFQPQYRKTFNGPVSRQQIHDVIDQQIPSDNLFCVRIDGNFRHAHTRTVPRQTPPYRAMTDVLDDQPVFRFNQREGVLVGFRTPQHMQGINVAGYHEHFITDDRQGGGHLLDYQLESGVLTFGEIHKLMIDLPADSAFLQANLHPSNLDAAIRAVEN

SEQ ID NO: 44 - protein, 1231 aa, Mycobacterium tuberculosis
MANISSPFGQNEWLVEEMYRKFRDDPSSVDPSWHEFLVDYSPEPTSQPAAEPTRVTSPLVAERAAAAAPQAPPKPADTAAAGNGVVAALAAKTAVPPPAEGDEVAVLRGAAAAVVKNMSASLEVPTATSVRAVPAKLLIDNRIVINNQLKRTRGGKISFTHLLGYALVQAVKKFPNMNRHYTEVDGKPTAVTPAHTNLGLAIDLQGKDGKRSLVVAGIKRCETMRFAQFVTAYEDIVRRARDGKLTTEDFAGVTISLTNPGTIGTVHSVPRLMPGQGAIIGVGAMEYPAEFQGASEERIAELGIGKLITLTSTYDHRIIQGAESGDFLRTIHELLLSDGFWDEVFRELSIPYLPVRWSTDNPDSIVDKNARVMNLIAAYRNRGHLMADTDPLRLDKARFRSHPDLEVLTHGLTLWDLDRVFKVDGFAGAQYKKLRDVLGLLRDAYCRHIGVEYAHILDPEQKEWLEQRVETKHVKPTVAQQKYILSKLNAAEAFETFLQTKYVGQKRFSLEGAESVIPMMDAAIDQCAEHGLDEVVIGMPHRGRLNVLANIVGKPYSQIFTEFEGNLNPSQAHGSGDVKYHLGATGLYLQMFGDNDIQVSLTANPSHLEAVDPVLEGLVRAKQDLLDHGSIDSDGQRAFSVVPLMLHGDAAFAGQGVVAETLNLANLPGYRVGGTIHIIVNNQIGFTTAPEYSRSSEYCTDVAKMIGAPIFHVNGDDPEACVWVARLAVDFRQRFKKDVVIDMLCYRRRGHNEGDDPSMTNPYVYDVVDTKRGARKSYTEALIGRGDISMKEAEDALRDYQGQLERVFNEVRELEKHGVQPSESVESDQMIPAGLATAVDKSLLARIGDAFLALPNGFTAHPRVQPVLEKRREMAYEGKIDWAFGELLALGSLVAEGKLVRLSGQDSRRGTFSQRHSVLIDRHTGEEFTPLQLLATNSDGSPTGGKFLVYDSPLSEYAAVGFEYGYTVGNPDAVVLWEAQFGDFVNGAQSIIDEFISSGEAKWGQLSNVVLLLPHGHEGQGPDHTSARIERFLQLWAEGSMTIAMPSTPSNYFHLLRRHALDGIQRPLIVFTPKSMLRHKAAVSEIKDFTEIKFRSVLEEPTYEDGIGDRNKVSRILLTSGKLYYELAARKAKDNRNDLAIVRLEQLAPLPRRRLRETLDRYENVKEFFWVQEEPANQGAWPRFGLELPELLPDKLAGIKRISRRAMSAPSSGSSKVHAVEQQEILDEAFG

SEQ ID NO: 45 - protein, 985 aa, Bradyrhizobium japonicum
MSRQDANAAFALSSFLQGTNATYIDEIYARYEKDPSSVDAEWQEFFKSLKDQPDDVRRNAEGPSWERANWPLTPQDDLTSALDGNWAEVEKAVGGKIAAKAQAKGADISSADLLQATRDSVRALMLIRSYRMRGHFHAKLDPLGIEAPRNREELDPRTYGFSEADFDRKIFLDHVLGLEYGTLREITAICERTYCQTLGVEFMHISNAAQKAWIQERIEGPDKEISFTREGRRAILTKLVEAEGFEKFCDTKFTGTKRFGLDGAESLIPALEQIIKRGGNLGVKEIVLGMPHRGRLNVLTQVMGKAHRALFHEFKGGSANPDAVEGSGDVKYHLGASSDREFDGNRIHLSLTANPSHLEIVDPVVLGKVRAKQDQHGDPPDMRISVMPLLMHGDAAFAGQGVVAECFGLSDLKGYRTGGSVHFIVNNQIGFTTYPRYSRSSPYPSDVAKMIDAPIFHVNGDDPEAVVFAAKVATEFRQKFHKPVVIDMFCYRRHGHNEGDEPAFTQPVMYKKIAAHPSTLELYARRLISEGVMTEGEVDKAKADWRARLDAEFEAGTSYKPNKADWLDGKWAGFKIADQEEDARRGVTGVDITALKDIGRKITKVPDGFRVHRTIQRFLENRSKAIDSGAGIDWATGEALAFCSLLNENHHVRLSGQDSERGTFSQRHSVLIDQEDESRYTPFNHLGHEQGHYEVINSLLSEEAVLGFEYGYSLAEPNTLTLWEAQFGDFANGAQVVFDQFISSGERKWLRMSGLVCLLPHGYEGQGPEHSSARLERYLQMCAEDNMQVVYPTTPANYFHVLRRQLHREIRKPLILMTPKSLLRHKRAVSRLEELAKGTTFHRILYDDAQMLPTDAIKLVPDEKIRRIVLCSGKVYYDLYEEREKRGIDDIYLMRVEQLYPVPLKALVAELSRFKKAEVVWCQEEPRNMGAWHFIEPYLEWVLNQVNGVSRRPRYVGRAASAATATGLMSKHQAQLKAFLDEALS

SEQ ID NO: 46 - protein, 995 aa, Rhizobium loti
MARQDQTNDQFSLTSFLYGGNADYIDALYAAYEDDPASVNPEWQEFFAGLKDDAGDVRRNAKGASWAKPSWPLQANGELVSALDGNWGIVEKHLEKKVKDKAVTNGVVLSDADVHQATRDSVRAIMMIRAYRMRGHLHANLDPLGIAKPLEDYNELSPENYGFTAADYDRPIFLDNVLGLEFGTIRQMLEILTRTYCSTLGVEFMHISDPEEKAWIQARIEGADKEISFTNTGKKAILQKLVEAEGFEQFIDVKYKGTKRFGLDGGEALIPALEQIVKRGGQLGMKEIVLGMAHRGRLNVLSQVMAKPHRAIFHEFKGGSAAPDEVEGSGDVKYHLGASSDREFDGNKVHLSLTANPSHLEIVDPVVMGKARAKQDYLFGRGREEIVPLEERAKVLPLLLHGDAAFAGQGVIAEILGLSGLRGHRVAGTLHFIINNQIGFTTNPRFSRSSPYPSDVAKMIEAPIFHVNGDDPEAVVHATKVAIEFRMKFHKPVVVDMFCYRRFGHNEGDEPAFTQPIMYRNIRTHKTTVQIYADRLIAEGHITQAELDQMKADWRAHLESEWEVGQHYKPNKADWLDGAWSGLRTADNQDEQRRGKTAVPVKTLKEIGKKLTEVPKGFEAHKTIIRFLENRREAIESGEGIDWSTAEALAFGAILLDGNPIRLSGQDSERGTFSQRHSVLYDQRDETRYIPLNNLSAAQAGYEVINSMLSEEAVLGFEYGYSLAEPKALTLWEAQFGDFANGAQVVFDQFISSGERKWLRMSGLVCLLPHGYEGQGPEHSSARLERFLQLCAEDNMQVANCTTPANYFHILRRQLKRDFRKPLILMTPKSLLRHKRAVSTLPEISGESSFHRLLWDDAQLLPNQPIKLTKDSKIRRVVLCSGKVYYDLYEEREKRGINDIYLLRVEQLYPFPAKALITELSRFRNAEMVWCQEEPKNMGAWSFIDPYLEWVLAHIDAKHQRVRYTGRPAAASPATGLMSKHLAQLAALLEDALGE

SEQ ID NO: 47 - protein, 547 aa, Lactococcus lactis
MYTVGDYLLDRLHELGIEEIFGVPGDYNLQFLDQIISREDMKWIGNANELNASYMADGYARTKKAAAFLTTFGVGELSAINGLAGSYAENLPVVEIVGSPTSKVQNDGKFVHHTLADGDFKHFMKMHEPVTAARTLLTAENATYEIDRVLSQLLKERKPVYINLPVDVAAAKAEKPALSLEKESSTTNTTEQVILSKIEESLKNAQKPVVIAGHEVISFGLEKTVTQFVSETKLPITTLNFGKSAVDESLPSFLGIYNGKLSEISLKNFVESADFILMLGVKLTDSSTGAFTHHLDENKMISLNIDEGIIFNKVVEDFDFRAVVSSLSELKGIEYEGQYIDKQYEEFIPSSAPLSQDRLWQAVESLTQSNETIVAEQGTSFFGASTIFLKSNSRFIGQPLWGSIGYTFPAALGSQIADKESRHLLFIGDGSLQLTVQELGLSIREKLNPICFIINNDGYTVEREIHGPTQSYNDIPMWNYSKLPETFGATEDRVVSKIVRTENEFVSVMKEAQADVNRMYWIELVLEKEDAPKLLKKMGKLFAEQNK

SEQ ID NO: 48 - DNA, 1728 bp, Issatchenkia orientalis
atgactgacaaaatctccctaggtacttatctgtttgaaaagttaaaggaagcaggctcttattccatctttggtgttcctggtgatttcaatttggcattgttggaccacgtcaaggaagttgaaggcattagatgggtcggtaacgctaacgagttgaatgccggctacgaagctgatggttatgcaagaatcaatggatttgcatccctaatcaccacctttggtgtcggtgaattgtctgccgtcaatgccattgcaggttcttatgctgaacacgtcccattgatccatattgttggtatgccttccttgtctgctatgaagaacaacttgttgttacaccataccttgggtgacacaagattcgacaacttcaccgaaatgtcaaagaaaatcagtgcaaaggttgaaattgtttacgatttggaatcagctccaaaattaattaataacttgattgaaaccgcttatcacacaaagagaccagtctacttgggacttccttccaactttgctgatgaattggttccagcggcattagttaaggaaaacaagttacatttagaagaacctctaaacaaccccgttgctgaagaagaattcattcataacgttgttgaaatggtcaagaaggcagaaaaaccaatcattctcgttgacgcttgtgctgcaagacataacatttctaaggaagtgagagagttggctaaattgactaaattccctgtcttcaccaccccaatgggtaaatctactgttgatgaagatgatgaagaattctttggcttatacttgggttctctatctgctccagatgttaaggacattgttggcccaaccgattgtatcttatccttaggtggtttaccttctgatttcaacaccggttccttctcatatggttacaccactaagaatgtcgttgaattccattccaactactgtaaattcaaatctgcaacttatgaaaacttgatgatgaagggcgcagtccaaagattgatcagcgaattgaagaatattaagtattccaatgtctcaactttatctccaccaaaatctaaatttgcttacgaatctgcaaaggttgctccagaaggtatcatcactcaagattacctgtggaagagattatcttacttcttaaagccaagagatatcattgtcactgaaactggtacttcctcctttggtgtcttggctacccacttaccaagagattcaaagtctatctcccaagtcttatggggttccattggtttctccttaccagctgcagttggtgctgcatttgctgctgaagatgcacacaaacaaactggcgaacaagaaagaagaactgttttgtttattggtgatggttctttacaattgactgtccaatcaatctcagatgctgcaagatggaacatcaagccatacatcttcatcttaaacaacagaggttacactatcgaaaagttgatccacggtcgtcatgaggactacaaccaaattcaaccatgggatcaccaattgttattgaagctctttgctgacaagacccaatatgaaaaccatgttgttaaatccgctaaggacttggacgctttgatgaaggatgaagcattcaacaaggaagataagattagagtcattgaattattcttggatgaattcgatgctccagaaatcttggttgctcaagctaaattatctgatgaaatcaactctaaagccgcttaa

SEQ ID NO: 49 - protein, 575 aa, Issatchenkia orientalis
MTDKISLGTYLFEKLKEAGSYSIFGVPGDFNLALLDHVKEVEGIRWVGNANELNAGYEADGYARINGFASLITTFGVGELSAVNAIAGSYAEHVPLIHIVGMPSLSAMKNNLLLHHTLGDTRFDNFTEMSKKISAKVEIVYDLESAPKLINNLIETAYHTKRPVYLGLPSNFADELVPAALVKENKLHLEEPLNNPVAEEEFIHNVVEMVKKAEKPIILVDACAARHNISKEVRELAKLTKFPVFTTPMGKSTVDEDDEEFFGLYLGSLSAPDVKDIVGPTDCILSLGGLPSDFNTGSFSYGYTTKNVVEFHSNYCKFKSATYENLMMKGAVQRLISELKNIKYSNVSTLSPPKSKFAYESAKVAPEGIITQDYLWKRLSYFLKPRDIIVTETGTSSFGVLATHLPRDSKSISQVLWGSIGFSLPAAVGAAFAAEDAHKQTGEQERRTVLFIGDGSLQLTVQSISDAARWNIKPYIFILNNRGYTIEKLIHGRHEDYNQIQPWDHQLLLKLFADKTQYENHVVKSAKDLDALMKDEAFNKEDKIRVIELFLDEFDAPEILVAQAKLSDEINSKAA

SEQ ID NO: 50 - protein, 563 aa, Saccharomyces cerevisiae
MSEITLGKYLFERLKQVNVNTVFGLPGDFNLSLLDKIYEVEGMRWAGNANELNAAYAADGYARIKGMSCIITTFGVGELSALNGIAGSYAEHVGVLHVVGVPSISAQAKQLLLHHTLGNGDFTVFHRMSANISETTAMITDIATAPAEIDRCIRTTYVTQRPVYLGLPANLVDLNVPAKLLQTPIDMSLKPNDAESEKEVIDTILALVKDAKNPVILADACCSRHDVKAETKKLIDLTQFPAFVTPMGKGSIDEQHPRYGGVYVGTLSKPEVKEAVESADLILSVGALLSDFNTGSFSYSYKTKNIVEFHSDHMKIRNATFPGVQMKFVLQKLLTTIADAAKGYKPVAVPARTPANAAVPASTPLKQEWMWNQLGNFLQEGDVVIAETGTSAFGINQTTFPNNTYGISQVLWGSIGFTTGATLGAAFAAEEIDPKKRVILFIGDGSLQLTVQEISTMIRWGLKPYLFVLNNDGYTIEKLIHGPKAQYNEIQGWDHLSLLPTFGAKDYETHRVATTGEWDKLTQDKSFNDNSKIRMIEIMLPVFDAPQNLVEQAKLTAATNAKQ

SEQ ID NO: 51 - protein, 563 aa, Kluyveromyces lactis
MSEITLGRYLFERLKQVEVQTIFGLPGDFNLSLLDNIYEVPGMRWAGNANELNAAYAADGYARLKGMSCIITTFGVGELSALNGIAGSYAEHVGVLHVVGVPSVSSQAKQLLLHHTLGNGDFTVFHRMSSNISETTAMITDINTAPAEIDRCIRTTYVSQRPVYLGLPANLVDLTVPASLLDTPIDLSLKPNDPEAEEEVIENVLQLIKEAKNPVILADACCSRHDAKAETKKLIDLTQFPAFVTPMGKGSIDEKHPRFGGVYVGTLSSPAVKEAVESADLVLSVGALLSDFNTGSFSYSYKTKNIVEFHSDYTKIRSATFPGVQMKFALQKLLTKVADAAKGYKPVPVPSEPEHNEAVADSTPLKQEWVWTQVGEFLREGDVVITETGTSAFGINQTHFPNNTYGISQVLWGSIGFTTGATLGAAFAAEEIDPKKRVILFIGDGSLQLTVQEISTMIRWGLKPYLFVLNNDGYTIERLIHGETAQYNCIQNWQHLELLPTFGAKDYEAVRVSTTGEWNKLTTDEKFQDNTRIRLIEVMLPTMDAPSNLVKQAQLTAATNAKN

SEQ ID NO: 52 - protein, 568 aa, Zymomonas mobilis
MSYTVGTYLAERLVQIGLKHHFAVAGDYNLVLLDNLLLNKNMEQVYCCNELNCGFSAEGYARAKGAAAAVVTYSVGALSAFDAIGGAYAENLPVILISGAPNNNDHAAGHVLHHALGKTDYHYQLEMAKNITAAAEAIYTPEEAPAKIDHVIKTALREKKPVYLEIACNIASMPCAAPGPASALFNDEASDEASLNAAVEETLKFIANRDKVAVLVGSKLRAAGAEEAAVKFADALGGAVATMAAAKSFFPEENPHYIGTSWGEVSYPGVEKTMKEADAVIALAPVFNDYSTTGWTDIPDPKKLVLAEPRSVVVNGIRFPSVHLKDYLTRLAQKVSKKTGALDFFKSLNAGELKKAAPADPSAPLVNAEIARQVEALLTPNTTVIAETGDSWFNAQRMKLPNGARVEYEMQWGHIGWSVPAAFGYAVGAPERRNILMVGDGSFQLTAQEVAQMVRLKLPVIIFLINNYGYTIEVMIHDGPYNNIKNWDYAGLMEVFNGNGGYDSGAGKGLKAKTGGELAEAIKVALANTDGPTLIECFIGREDCTEELVKWGKRVAAANSRKPVNKLL

SEQ ID NO: 53 - protein, 557 aa, Acetobacter pasteurianus
MTYTVGMYLAERLVQIGLKHHFAVGGDYNLVLLDQLLLNKDMKQIYCCNELNCGFSAEGYARSNGAAAAVVTFSVGAISAMNALGGAYAENLPVILISGAPNSNDQGTGHILHHTIGKTDYSYQLEMARQVTCAAESITDAHSAPAKIDHVIRTALRERKPAYLDIACNIASEPCVRPGPVSSLLSEPEIDHTSLKAAVDATVALLKNRPAPVMLLGSKLRAANALAATETLADKLQCAVTIMAAAKGFFPEDHAGFRGLYWGEVSNPGVQELVETSDALLCIAPVFNDYSTVGWSGMPKGPNVILAEPDRVTVDGRAYDGFTLRAFLQALAEKAPARPASAQKSSVPTCSLTATSDEAGLTNDEIVRHINALLTSNTTLVAETGDSWFNAMRMTLAGARVELEMQWGHIGWSVPSAFGNAMGSQDRQHVVMVGDGSFQLTAQEVAQMVRYELPVIIFLINNRGYVIEIAIHDGPYNYIKNWDYAGLMEVFNAGEGHGLGLKATTPKELTEAIARAKANTRGPTLIECQIDRTDCTDMLVQWGRKVASTNARKTTLA

SEQ ID NO: 54 - protein, 528 aa, Pseudomonas putida [sequence omitted]

SEQ ID NO: 55 - protein, 528 aa, Pseudomonas aeruginosa
MKTVHSASYEILRRHGLTTVFGNPGSNELPFLKDFPEDFRYILGLHEGAVVGMADGFALASGRPAFVNLHAAAGTGNGMGALTNAWYSHSPLVITAGQQVRSMIGVEAMLANVDAGQLPKPLVKWSHEPACAQDVPRALSQAIQTASLPPRAPVYLSIPYDDWAQPAPAGVEHLAARQVSGAALPAPALLAELGERLSRSRNPVLVLGPDVDGANANGLAVELAEKLRMPAWVAPSASRCPFPTRHACFRGVLPAAIAGISRLLDGHDLILVVGAPVFRYHQFAPGDYLPAGAELVQVTCDPGEAARAPMGDALVGDIALTLEALLEQVRPSARPLPEALPRPPALAEEGGPLRPETVFDVIDALAPRDAIFVKESTSTVTAFWQRVEMREPGSYFFPAAGGLGFGLPAAVGAQLAQPRRQVIGIIGDGSANYGITALWSAAQYRVPAVFIILKNGTYGALRWFAGVLEVPDAPGLDVPGLDFCAIARGYGVEALHAATREELEGALKHALAADRPVLIEVPTQTIEP

SEQ ID NO: 56 - protein, 526 aa, Pseudomonas stutzeri
MASVHSITYELLRRQGIDTVFGNPGSNELPFLKDFPEDFRYILALQEACVVGIADGYAQASRKPAFINLHSAAGTGNAMGAMSNAWNCHSPLIVTAGQQNRAMIGVEALLTNVDAASLPRPLVKWSYEPASAAEVPHAMSRAIHMASMAPRGPVYLSVPYDDWDKEADPQSHHLYDRSVNSAVRLNDQDLEVLVEALNSASNPAIVLGPDVDSANANADCVTLAERLKAPVWVAPSAPRCPFPTRHPCFRGLMPAGIAAISQLLEGHDVVLVIGAPVFRYHQYDPGQYLKPGTRLISITCDPLEAARAPMGDAIVADIGTMTAALASRIGESERQLPAVLPSPERVNQDAGRLRPETVFDTLNEMAPEDAIYLNESTSTTAQMWQRLNMRNPGSYYFCAAGGLGFALPAAIGVQLAEPDRQVIAVIGDGSANYSISALWTAAHYNIPAIFLIMNNGTYGALRWFAGVLEAENVPGLDVPGIDFCAIAKGYGIPALKADNLEQLKGSIHEALSAKGPVLIEVSTVSL

SEQ ID NO: 57 - protein, 528 aa, Pseudomonas fluorescens
MKTVHSASYDILRQQGLTTVFGNPGSNELPFLKGFPEDFRYILGLHEGAVVGMADGFALASGQPAFVNLHAAAGTGNGMGALTNAWYSHSPLVITAGQQVRSMIGVEAMLANVDAPQLPKPLVKWSAEPACAEDVPRALSQAIHMANQAPKGPVYLSIPYDDWARPAPAGVEHLARRQVATAGLPSAAQLRSLVQRLAAARNPVLVLGPDVDGSRSNHLAVQLAEKLRMPAWVAPSASRCPFPTRHPSFRGVLPAAIAGISRCLADHDLILVVGAPVFRYHQFAPGDYLPAGTELLHITCDPGEAARAPMGDALVGDIVETLQALVWALPDCDRPQPQALPPAAPVEELGGLLRPETVFDVIDELAPKDAIYVKESTSTVGAFWQRVEMREPGSYYFPAAGGLGFGLPAAVGVQLARPERRVIGVIGDGSANYGITALWTAAQYQIPVVFIILKNGTYGALRWFAGVLQVSDAPGLDVPGLDFCAIGRGYGVHSVQANTREAFAQALSEALAGDRPVLIEVPTLTIEP

SEQ ID NO: 58 - protein, 1220 aa, Chloroflexus aurantiacus
MATGESMSGTGRLAGKIALITGGAGNIGSELTRRFLAEGATVIISGRNRAKLTALAEMQAEAGVPAKRIDLEVMDGSDPVAVRAGIEAIVARHGQIDILVNNAGSAGAQRRLAEIPLTEAELGPGAEETLHASIANLLGMGWHLMRIAAPHMPVGSAVINVSTIFSRAEYYGRIPYVTPKAALNALSQLAARELGARGIRVNTIFPGPIESDRIRTVFQRMDQLKGRPEGDTAHHFLNTMRLCRANDQGALERRFPSVGDVADAAVFLASAESAALSGETIEVTHGMELPACSETSLLARTDLRTIDASGRTTLICAGDQIEEVMALTGMLRTCGSEVIIGFRSAAALAQFEQAVNESRRLAGADFTPPIALPLDPRDPATIDAVFDWAGENTGGIHWILPATSHEPAPCVIEVDDERVLNFLADEITGTIVIASRLARYWQSQRLTPGARARGPRVIFLSNGADQNGNVYGRIQSAAIGQLIRVWRHEAELDYQRASAAGDHVLPPVWANQIVRFANRSLEGLEFACAWTAQLLHSQRHINEITLNIPANISATTGARSASVGWAESLIGLHLGKVALITGGSAGIGGQIGRLLALSGARVMLAARDRHKLEQMQAMIQSELAEVGYTDVEDRVHIAPGCDVSSEAQLADLVERTLSAFGTVDYLINNAGIAGVEEMVIDMPVEGWRHTLFANLISNYSLMRKLAPLMKKQGSGYILNVSSYFGGEKDAAIPYPNRADYAVSKAGQRAMAEVFARFLGPEIQINAIAPGPVEGDRLRGTGERPGLFARRARLILENKRLNELHAALIAAARTDERSMHELVELLLPNDVAALEQNPAAPTALRELARRFRSEGDPAASSSSALLNRSIAAKLLARLHNGGYVLPADIFANLPNPPDPFFTRAQIDREARKVRDGIMGMLYLQRMPTEFDVAMATVYYLADRNVSGETFHPSGGLRYERTPTGGELFGLPSPERLAELVGSTVYLIGEHLTEHLNLLAMYLERYGARQVWIVETETGAETMRRLLHDHVEAGRLMTIVAGDQIEAAIDQAITRYGRPGPVVCTPFRPLPTVPLVGRKDSDWSTVLSEAEFAELCEHQLTHHFRVARKIALSDGASLALVTPETTATSTTEQFALANFIKTTLHAFTATIGVESERTAQRILINQVDLTRRARAEEPRDPHERQQELERFIEAVLLVTAPLPPEADTRYAGRIHRGRAITV

SEQ ID NO: 59 - protein, 1229 aa, Roseiflexus castenholzii
MSTVRRLEGKVALITGGAGNIGEVITRRFLAEGATVVITGRNAEKLAVYRRRLIDEERVAPERVVALRMDGSDIAQVRAGVAQIVHGGTDVPIPLHRIDILVNNAGSAGPRRRLVDIPLEPSEVQPPDSETLAQAVGNLVGITWNLTRAAAPHMPSGSSVINISTIFSRTDYYGRIAYVAPKAALNALSDGLARELGVRGIRVNTIYPGPIESERIYTMFQAMDALKGQPEGDTASGFLRMMRLSRIDQNGEVVKRFPSPVDVANTAVFLASDESAAFTGHAFEVTHGMEVPTESRTTFVSRPGLRSVDATGKVILICAGDQVDDAVALADTLRSCRATVVIGFRDPRALEKASVLLREPRHALAADMYGRPTMTAEARLVRLDPLDPRAAAQTLEQIHAELGAIHHAVVLPGQSRHAPSASLIEVDDQVVERFLHQELVGTIALARELARFWEEYPSGSSMHRVLFVSNPDDQQGNQYSHILRAAVEQLVRVWRHESEYDSVNPAHQQEGQSSAAVWANQLIRYVNNEMANLDFTCAWVAKLLGSDRRIAEINLYLPEEIVGTIGVHNPGFGWAESLFGLHMGKVALITGGSAGIGGQIGRLLALSGAHVMLAARNADQLEQMRASIVREVRDASYPDAESRVAIFPGSDVSDIDGLERLVNHTVRVFGKVDYLINNAGIAGAEEMVIDMPVDAWRHTLRANLISNYALLRRLAPQMKAAGGAYVLNVSSYFGGEKYVAIPYPNRSDYAVSKAGQRAMVESLARFLGPEIQINAIAPGPVEGERLKGAGSRPGLFMRRARLILENKRLNEVFAALLAARHEGATIADLLPDLFANDIQSIANSAAMPAPLRRLATMLRETSDAGGSAQSYLMNATIARKLLNRLENGGYITLHDRRALTVEPPEPFFTEAQIEREAIKVRDGILGMLHLQRMPTEFDVALATVFYLADRNVTGETFHPSGGLRFERTVTEGELFGKPGQQRLERLKGSVVYLIGEHLRQHLVLLARTFLDEIHVARVVLLTETTQAATDLAAELSDYEAAGRFVVIPTCGDIEGGIDRAMAEYGRPGPVISTPFRPLPDRALSARNGDWSSVLTTAEFEELVEQQITHHFRVARKAGLIEGANVTLVTPPTSARSTSEEFALANFVKTTLHALTATAGAESERTVPHVPVNQVDLTRRARSEEPRTPSEEEEELQRFVNAVLLTSAPLPTPLESRYRARIYRGNAITV

SEQ ID NO: 60 - protein, 1217 aa, Erythrobacter sp.
MSKEGNAAKGRLEGKVALITGAAGNLGNEISRAFAREGAFVVMTGRTEERISAAREQLIADTGVAPERIDTAVLDGGNPDSIRAAMAKLRKEYGRIDILINNAGSAGPKQPLHNVPLSPQEMEACGDTETVRDAMLNILGVTWNMARIVAPMMPVGGAMVNISTIFSHTRYYGRTAYVVPKAALNALSNQLASELGPRGIRVNTVFPGPIESDRIRTVFAAMDEVQSQPKDTTANYFTGRMALTRSVNGKVDGKPLPNPKDIAGTCLFLASEEAAGIAGEEVDVTHGLSANRTSASTYMTRPSMRSLDGAGLNIFIVSGENWDDALVAAHTLIGSGAKVRLGLARNADVAQANARLKAQGIGEELTVTRFNRAEPDAMEDALAAFSGDVDGAITGAIILPVKPSGHFTGSLLAADDDTVTKFMDTELVGAIAVSRSLARYWHGREDLQSPPRCVFMTNPGDPLGNSFASVLSAGITQLIRIWRDEERVQAGNGSTEHAVWSNQIVRHTNTEDENTRFASGHATRVLFREQHIAEIDLKLPANISEETGSRKAMVGFAENITGLHLGKVAFITGGSAGIGGQVARLLALAGAKVMMVARRESELVAARDRIVGELQDIGFAGVERRVKYMADIDVSDFASLDKAVDATLEEFGRIDYLINNAGVAGAEDMVIDMEPEAWRFTLDANLISNYHLMQRVVPLMKEQGSGYVLNVSSYFGGEKFLAVAYPNRADYGLSKAGQRAMVEAFSPFLGPEVQCNAIAPGPVDGDRLSGTGGKPGLFQRRAKLILENKRLNAVYSAVIHAIREGGDAAKILTRLSRNSTSTLSHDAEAPEELRKLALDFASQGDGLCTWDQYLLTDAMAQRLLVRLQLGGFLLGSNEWASLSSSEQTWLKLSPPDDKPFLPAAQVDKVANGVGKGVISQLHLGAMPTEAEVAQATVFFLADRAVSGETFMPSGGLRVERSNTEREMFGSPKQERIDKMKGKTVWIIGEHLSDYVAATIEELVSGCGVAKVVLIAKDKSGEKAVRDQLPNDLSKDALEVLIAGDGLEEAMDEALGHWGKPTTVLSMPGEPLPDHLFEGGNPLSTKDFAHMVEANITRHYRVTRKASLYDGCQVVLVSPDVPYGSDGPGVALANFVKTSLHAFTATVAVENERLVHDVPVNQINLTRRVSSEEPRDADEHAEELRRFTRAVLLVGAPLPDAQDSRYRSKIYRGTSMTV

SEQ ID NO: 61 - protein, 357 aa, Metallosphaera sedula
MRRTLKAAILGATGLVGIEYVRMLADHPYIKPTYLAGKGSVGKPYGEIVRWQTVGNVPKEVANQEVKPTDPKLMDDVDIIFSPLPQGAAGPVEEQFAKLGFNVISNSPDHRFDMDVPMIIPEVNPHTVTLIDEQRKRRDWKGFIVTTPLCTAQGAAIPLTPIYQNFKMSGVMITTMQSLSGAGYPGIASLDIVDNALPLGDGYDAKTVKEITRILSEVKRNVQEPGVNEITLDATTHRIATIHGHYEVAYVTFKEDTDVRKVMESMESFKGEPQDLKLPTAPEKPIIVTTQDARPQVFFDRWAGNPPGMSVVVGRLKQVNPRTIRFVSLIHNTVRGAAGGGVLTAELLVEKGYIDKR

SEQ ID NO: 62 - protein, 356 aa, Sulfolobus tokodaii
MRRTLKAAILGATGLVGIEYVRMLSNHPYIKPAYLAGKGSVGKPYGEVVRWQTVGQVPKEIADMEIKPTDPKLMDDVDIIFSPLPQGAAGPVEEQFAKEGFPVISNSPDHRFDPDVPLLVPELNPHTISLIDEQRKRREWKGFIVTTPLCTAQGAAIPLGAIFKDYKMDGAFITTIQSLSGAGYPGIPSLDVVDNILPLGDGYDAKTIKEIFRILSEVKRNVDEPKLEDVSLAATTHRIATIHGHYEVLYVSFKEETAAEKVKETLENFRGEPQDLKLPTAPSKPIIVMNEDTRPQVYFDRWAGDIPGMSVVVGRLKQVNKRMIRLVSLIHNTVRGAAGGGILAAELLVEKGYIEK

SEQ ID NO: 63 - protein, 482 aa, Saccharomyces cerevisiae
MSAFVRVVPRISRSSVLTRSLRLQLRCYASYPEHTIIGMPALSPTMTQGNLAAWTKKEGDQLSPGEVIAEIETDKAQMDFEFQEDGYLAKILVPEGTKDIPVNKPIAVYVEDKADVPAFKDFKLEDSGSDSKTSTKAQPAEPQAEKKQEAPAEETKTSAPEAKKSDVAAPQGRIFASPLAKTIALEKGISLKDVHGTGPRGRITKADIESYLEKSSKQSSQTSGAAAATPAAATSSTTAGSAPSPSSTASYEDVPISTMRSIIGERLLQSTQGIPSYIVSSKISISKLLKLRQSLNATANDKYKLSINDLLVKAITVAAKRVPDANAYWLPNENVIRKFKNVDVSVAVATPTGLLTPIVKNCEAKGLSQISNEIKELVKRARINKLAPEEFQGGTICISNMGMNNAVNMFTSIINPPQSTILAIATVERVAVEDAAAENGFSFDNQVTITGTFDHRTIDGAKGAEFMKELKTVIENPLEMLL

SEQ ID NO: 64 - protein, 420 aa, Saccharomyces cerevisiae
MLAASFKRQPSQLVRGLGAVLRTPTRIGHVRTMATLKTTDKKAPEDIEGSDTVQIELPESSFESYMLEPPDLSYETSKATLLQMYKDMVIIRRMEMACDALYKAKKIRGFCHLSVGQEAIAVGIENAITKLDSIITSYRCHGFTFMRGASVKAVLAELMGRRAGVSYGKGGSMHLYAPGFYGGNGIVGAQVPLGAGLAFAHQYKNEDACSFTLYGDGASNQGQVFESFNMAKLWNLPVVFCCENNKYGMGTAASRSSAMTEYFKRGQYIPGLKVNGMDILAVYQASKFAKDWCLSGKGPLVLEYETYRYGGHSMSDPGTTYRTRDEIQHMRSKNDPIAGLKMHLIDLGIATEAEVKAYDKSARKYVDEQVELADAAPPPEAKLSILFEDVYVKGTETPTLRGRIPEDTWDFKKQGFASRD

SEQ ID NO: 65 - protein, 366 aa, Saccharomyces cerevisiae
MFSRLPTSLARNVARRAPTSFVRPSAAAAALRFSSTKTMTVREALNSAMAEELDRDDDVFLIGEEVAQYNGAYKVSKGLLDRFGERRVVDTPITEYGFTGLAVGAALKGLKPIVEFMSFNFSMQAIDHVVNSAAKTHYMSGGTQKCQMVFRGPNGAAVGVGAQHSQDFSPWYGSIPGLKVLVPYSAEDARGLLKAAIRDPNPVVFLENELLYGESFEISEEALSPEFTLPYKAKIEREGTDISIVTYTRNVQFSLEAAEILQKKYGVSAEVINLRSIRPLDTEAIIKTVKKTNHLITVESTFPSFGVGAEIVAQVMESEAFDYLDAPIQRVTGADVPTPYAKELEDFAFPDTPTIVKAVKEVLSIE

SEQ ID NO: 66 - protein, 499 aa, Saccharomyces cerevisiae
MLRIRSLLNNKRAFSSTVRTLTINKSHDVVIIGGGPAGYVAAIKAAQLGFNTACVEKRGKLGGTCLNVGCIPSKALLNNSHLFHQMHTEAQKRGIDVNGDIKINVANFQKAKDDAVKQLTGGIELLFKKNKVTYYKGNGSFEDETKIRVTPVDGLEGTVKEDHILDVKNIIVATGSEVTPFPGIEIDEEKIVSSTGALSLKEIPKRLTIIGGGIIGLEMGSVYSRLGSKVTVVEFQPQIGASMDGEVAKATQKFLKKQGLDFKLSTKVISAKRNDDKNVVEIVVEDTKTNKQENLEAEVLLVAVGRRPYIAGLGAEKIGLEVDKRGRLVIDDQFNSKFPHIKVVGDVTFGPMLAHKAEEEGIAAVEMLKTGHGHVNYNNIPSVMYSHPEVAWVGKTEEQLKEAGIDYKIGKFPFAANSRAKTNQDTEGFVKILIDSKTERILGAHIIGPNAGEMIAEAGLALEYGASAEDVARVCHAHPTLSEAFKEANMAAYDKAIHC

SEQ ID NO: 67 - protein, 887 aa, Escherichia coli
MSERFPNDVDPIETRDWLQAIESVIREEGVERAQYLIDQLLAEARKGGVNVAAGTGISNYINTIPVEEQPEYPGNLELERRIRSAIRWNAIMTVLRASKKDLELGGHMASFQSSATIYDVCFNHFFRARNEQDGGDLVYFQGHISPGVYARAFLEGRLTQEQLDNFRQEVHGNGLSSYPHPKLMPEFWQFPTVSMGLGPIGAIYQAKFLKYLEHRGLKDTSKQTVYAFLGDGEMDEPESKGAITIATREKLDNLVFVINCNLQRLDGPVTGNGKIINELEGIFEGAGWNVIKVMWGSRWDELLRKDTSGKLIQLMNETVDGDYQTFKSKDGAYVREHFFGKYPETAALVADWTDEQIWALNRGGHDPKKIYAAFKKAQETKGKATVILAHTIKGYGMGDAAEGKNIAHQVKKMNMDGVRHIRDRFNVPVSDADIEKLPYITFPEGSEEHTYLHAQRQKLHGYLPSRQPNFTEKLELPSLQDFGALLEEQSKEISTTIAFVRALNVMLKNKSIKDRLVPIIADEARTFGMEGLFRQIGIYSPNGQQYTPQDREQVAYYKEDEKGQILQEGINELGAGCSWLAAATSYSTNNLPMIPFYIYYSMFGFQRIGDLCWAAGDQQARGFLIGGTSGRTTLNGEGLQHEDGHSHIQSLTIPNCISYDPAYAYEVAVIMHDGLERMYGEKQENVYYYITTLNENYHMPAMPEGAEEGIRKGIYKLETIEGSKGKVQLLGSGSILRHVREAAEILAKDYGVGSDVYSVTSFTELARDGQDCERWNMLHPLETPRVPYIAQVMNDAPAVASTDYMKLFAEQVRTYVPADDYRVLGTDGFGRSDSRENLRHHFEVDASYVVVAALGELAKRGEIDKKVVADAIAKFNIDADKVNPRLA

SEQ ID NO: 68 - protein, 630 aa, Escherichia coli
MAIEIKVPDIGADEVEITEILVKVGDKVEAEQSLITVEGDKASMEVPSPQAGIVKEIKVSVGDKTQTGALIMIFDSADGAADAAPAQAEEKKEAAPAAAPAAAAAKDVNVPDIGSDEVEVTEILVKVGDKVEAEQSLITVEGDKASMEVPAPFAGTVKEIKVNVGDKVSTGSLIMVFEVAGEAGAAAPAAKQEAAPAAAPAPAAGVKEVNVPDIGGDEVEVTEVMVKVGDKVAAEQSLITVEGDKASMEVPAPFAGVVKELKVNVGDKVKTGSLIMIFEVEGAAPAAAPAKQEAAAPAPAAKAEAPAAAPAAKAEGKSEFAENDAYVHATPLIRRLAREFGVNLAKVKGTGRKGRILREDVQAYVKEAIKRAEAAPAATGGGIPGMLPWPKVDFSKFGEIEEVELGRIQKISGANLSRNWVMIPHVTHFDKTDITELEAFRKQQNEEAAKRKLDVKITPVVFIMKAVAAALEQMPRFNSSLSEDGQRLTLKKYINIGVAVDTPNGLVVPVFKDVNKKGIIELSRELMTISKKARDGKLTAGEMQGGCFTISSIGGLGTTHFAPIVNAPEVAILGVSKSAMEPVWNGKEFVPRLMLPISLSFDHRVIDGADGARFITIINNTLSDIRRLVM

SEQ ID NO: 69 - protein, 474 aa, Escherichia coli [sequence omitted]

SEQ ID NO: 70 - protein, 371 aa, Bacillus subtilis
MAAKTKKAIVDSKKQFDAIKKQFETFQILNEKGEVVNEAAMPDLTDDQLKELMRRMVFTRVLDQRSISLNRQGRLGFYAPTAGQEASQIATHFALEKEDFVLPGYRDVPQLIWHGLPLYQAFLFSRGHFRGNQMPDDVNALSPQIIIGAQYIQTAGVALGLKKRGKKAVAITYTGDGGASQGDFYEGINFAGAYKAPAIFVVQNNRYAISTPVEKQSAAETIAQKAVAAGIVGVQVDGMDPLAVYAATAEARERAINGEGPTLIETLTFRYGPHTMAGDDPTKYRTKEIENEWEQKDPLVRFRAFLENKGLWSEEEEAKVIEDAKEEIKQAIKKADAEPKQKVTDLMKIMYEKMPHNLEEQFEIYTQKESK

SEQ ID NO: 71 - protein, 325 aa, Bacillus subtilis
MAQMTMIQAITDALRTELKNDENVLVFGEDVGVNGGVFRATEGLQKEFGEDRVFDTPLAESGIGGLALGLGLNGFRPVMEIQFFGFVYEVMDSVSGQMARMRYRSGGRWTSPVTIRSPFGGGVHTPELHADSLEGLVAQQPGIKVVIPSTPYDAKGLLISAIRDNDPVVFLEHMKLYRSFRQEVPEEEYTIELGKADVKREGTDLSIITYGAMVHESLKAADELEKDGISAEVVDLRTVSPLDIDTIIASVEKTGRAIVVQEAQKQAGIAANVVAEINDRAILSLEAPVLRVAAPDTVFPFSQAESVWLPNHKDVLETARKVLEF

SEQ ID NO: 72 - protein, 442 aa, Bacillus subtilis
MAFEFKLPDIGEGIHEGEIVKWFVKPNDEVDEDDVLAEVQNDKAVVEIPSPVKGKVLELKVEEGTVATVGQTIITFDAPGYEDLQFKGSDESDDAKTEAQVQSTAEAGQDVAKEEQAQEPAKATGAGQQDQAEVDPNKRVIAMPSVRKYAREKGVDIRKVTGSGNNGRVVKEDIDSFVNGGAQEAAPQETAAPQETAAKPAAAPAPEGEFPETREKMSGIRKAIAKAMVNSKHTAPHVTLMDEVDVTNLVAHRKQFKQVAADQGIKLTYLPYVVKALTSALKKFPVLNTSIDDKTDEVIQKHYFNIGIAADTEKGLLVPVVKNADRKSVFEISDEINGLATKAREGKLAPAEMKGASCTITNIGSAGGQWFTPVINHPEVAILGIGRIAEKAIVRDGEIVAAPVLALSLSFDHRMIDGATAQNALNHIKRLLNDPQLILMEA

SEQ ID NO: 73 - protein, 470 aa, Bacillus subtilis
MVVGDFPIETDTLVIGAGPGGYVAAIRAAQLGQKVTVVEKATLGGVCLNVGCIPSKALINAGHRYENAKHSDDMGITAENVTVDFTKVQEWKASVVNKLTGGVAGLLKGNKVDVVKGEAYFVDSNSVRVMDENSAQTYTFKNAIIATGSRPIELPNFKYSERVLNSTGALALKEIPKKLVVIGGGYIGTELGTAYANFGTELVILEGGDEILPGFEKQMSSLVTRRLKKKGNVEIHTNAMAKGVEERPDGVTVTFEVKGEEKTVDADYVLITVGRRPNTDELGLEQVGIEMTDRGIVKTDKQCRTNVPNIYAIGDIIEGPPLAHKASYEGKIAAEAIAGEPAEIDYLGIPAVVFSEPELASVGYTEAQAKEEGLDIVAAKFPFAANGRALSLNETDGFMKLITRKEDGLVIGAQIAGASASDMISELSLAIEGGMTAEDIAMTIHAHPTLGEITMEAAEVAIGSPIHIVK

SEQ ID NO: 74 - protein, 2123 aa, Saccharomyces cerevisiae
MRSIRKWAYETFNDEKIIQFVVMATPDDLHANSEYIRMADQYVQVPGGTNNNNYANIDLILDVAEQTDVDAVWAGWGHASENPCLPELLASSQRKILFIGPPGRAMRSLGDKISSTIVAQSAKIPCIPWSGSHIDTIHIDNKTNFVSVPDDVYVRGCCSSPEDALEKAKLIGFPVMIKASEGGGGKGIRRVDNEDDFIALYRQAVNETPGSPMFVMKVVTDARHLEVQLLADQYGTNITLFGRDCSIQRRHQKIIEEAPVTITKPETFQRMERAAIRLGELVGYVSAGTVEYLYSPKDDKFYFLELNPRLQVEHPTTEMISGVNLPATQLQIAMGIPMHMISDIRKLYGLDPTGTSYIDFKNLKRPSPKGHCISCRITSEDPNEGFKPSTGKIHELNFRSSSNVWGYFSVGNNGAIHSFSDSQFGHIFAVGNDRQDAKQNMVLALKDFSIRGEFKTPIEYLIELLETRDFESNNISTGWLDDLILKNLSSDSKLDPTLAIICGAAMKAYVFTEKVRNKYLELLRRGQVPPKDFLKTKFPVDFIFDNNRYLFNVAQSSEEQFILSINKSQCEVNVQKLSSDCLLISVDGKCHTVYWKDDIRGTRLSIDSNTIFLEAELNPTQVISPTPGKLVKYLVRSGDHVFAGQQYAEIEIMKMQMPLVAKSDGVIELLRQPGSIIEAGDVIAKLTLDSPSKANESSLYRGELPVLGPPLIEGSRPNHKLRVLINRLENILNGYHENSGIETTLKELIKILRDGRLPYSEWDSQISTVRNRLPRQLNEGLGNLVKKSVSFPAKELHKLMKRYLEENTNDHVVYVALQPLLKISERYSEGLANHECEIFLKLIKKYYAVEKIFENHDIHEERNLLNLRRKDLTNLKKILCISLSHANVVAKNKLVTAILHEYEPLCQDSSKMSLKFRAVIHDLASLESKWAKEVAVKARSVLLRGIFPPIKKRKEHIKTLLQLHIKDTGAENIHSRNIYSCMRDFGNLIHSNLIQLQDLFFFFGHQDTALSSIASEIYARYAYGNYQLKSIKIHKGAPDLLMSWQFSSLRNYLVNSDGESDEFTKLSKPPSTSGKSSANSFGLLVNMRALESLEKTLDEVYEQIHIPEERLSSGENSLIVNILSPIRYRSENDLIKTLKIKLHENERGLSKLKVNRITFAFIAANAPAVKFYSFDGTTYDEISQIRNMDPSYEAPLELGKMSNYKIRSLPTYDSSIRIFEGISKFTPLDKRFFVRKIINSFMYNDQKTTEENLKAEINAQVVYMLEHLGAVDISNSDLNHIFLSFNTVLNIPVHRLEEIVSTILKTHETRLFQERITDVEICISVECLETKKPAPLRLLISNKSGYVVKIETYYEKIGKNGNLILEPCSEQSHYSQKSLSLPYSVKDWLQPKRYKAQFMGTTYVYDFPGLFHQAAIQQWKRYFPKHKLNDSFFSWVELIEQNGNLIKVNREPGLNNIGMVAFEIMVQTPEYPEGRNMIVISNDITYNIGSFGPREDLFFDRVTNYARERGIPRIYLAANSGAKLGIAEELIPLFRVAWNDPSDPTKGFQYLYLAPKDMQLLKDSGKGNSVVVEHKMVYGEERYIIKAIVGFEEGLGVECLQGSGLIAGATSKAYRDIFTITAVTCRSVGIGSYLVRLGQRTIQVEDKPIILTGASAINKVLGTDIYTSNLQIGGTQIMYKNGIAHLTASNDMKAIEKIMTWLSYVPAKRDMSPPLLETMDRWDRDVDFKPAKQVPYEARWLIEGKWDSNNNFQSGLFDKDSFFETLSGWAKGVIVGRARLGGIPVGVIAVETKTIEEIIPADPANLDSSEFSVKEAGQVWYPNSAFKTAQTINDFNYGEQLPLIILANWRGFSGGQRDMYNEVLKYGSFIVDALVDYKQPILIYIPPFGELRGGSWVVIDPTINPEQMEMYADVESRGGVLEPDGVVSIKYRKEKMIETMIRLDSTYGHLRRTLTEKKLSLEKQNDLTKRLKIRERQLIPIYNQISIQFADLHDRSTRMLVKGVIRNELEWKKSRRFLYWRLRRRLNEGQVIKRLQKKTCDNKTKMKYDDLLKIVQSWYNDLDVNDDRAVVEFIERNSKKIDKNIEEFEISLLIDELKKKFEDRRGNIVLEELTRLVDSKRKR

SEQ ID NO: 75 - protein, 319 aa, Escherichia coli
MSLNFLDFEQPIAELEAKIDSLTAVSRQDEKLDINIDEEVHRLREKSVELTRKIFADLGAWQIAQLARHPQRPYTLDYVRLAFDEFDELAGDRAYADDKAIVGGIARLDGRPVMIIGHQKGRETKEKIRRNFGMPAPEGYRKALRLMQMAERFKMPIITFIDTPGAYPGVGAEERGQSEAIARNLREMSRLGVPVVCTVIGEGGSGGALAIGVGDKVNMLQYSTYSVISPEGCASILWKSADKAPLAAEAMGIIAPRLKELKLIDSIIPEPLGGAHRNPEAMAASLKAQLLADLADLDVLSTEDLKNRRYQRLMSYGYA

SEQ ID NO: 76 - protein, 156 aa, Escherichia coli
MDIRKIKKLIELVEESGISELEISEGEESVRISRAAPAASFPVMQQAYAAPMMQQPAQSNAAAPATVPSMEAPAAAEISGHIVRSPMVGTFYRTPSPDAKAFIEVGQKVNVGDTLCIVEAMKMMNQIEADKSGTVKAILVESGQPVEFDEPLVVIE

SEQ ID NO: 77 - protein, 449 aa, Escherichia coli
MLDKIVIANRGEIALRILRACKELGIKTVAVHSSADRDLKHVLLADETVCIGPAPSVKSYLNIPAIISAAEITGAVAIHPGYGFLSENANFAEQVERSGFIFIGPKAETIRLMGDKVSAIAAMKKAGVPCVPGSDGPLGDDMDKNRAIAKRIGYPVIIKASGGGGGRGMRVVRGDAELAQSISMTRAEAKAAFSNDMVYMEKYLENPRHVEIQVLADGQGNAIYLAERDCSMQRRHQKVVEEAPAPGITPELRRYIGERCAKACVDIGYRGAGTFEFLFENGEFYFIEMNTRIQVEHPVTEMITGVDLIKEQLRIAAGQPLSIKQEEVHVRGHAVECRINAEDPNTFLPSPGKITRFHAPGGFGVRWESHIYAGYTVPPYYDSMIGKLICYGENRDVAIARMKNALQELIIDGIKTNVDLQIRIMNDENFQHGGTNIHYLEKKLGLQEK

SEQ ID NO: 78 - protein, 304 aa, Escherichia coli
MSWIERIKSNITPTRKASIPEGVWTKCDSCGQVLYRAELERNLEVCPKCDHHMRMTARNRLHSLLDEGSLVELGSELEPKDVLKFRDSKKYKDRLASAQKETGEKDALVVMKGTLYGMPVVAAAFEFAFMGGSMGSVVGARFVRAVEQALEDNCPLICFSASGGARMQEALMSLMQMAKTSAALAKMQERGLPYISVLTDPTMGGVSASFAMLGDLNIAEPKALIGFAGPRVIEQTVREKLPPGFQRSEFLIEKGAIDMIVRRPEMRLKLASILAKLMNLPAPNPEAPREGVVVPPVPDQEPEA

SEQ ID NO: 79 - protein, 282 aa, Chloroflexus aurantiacus
MEETAIPQSLTPWDRVQLARHPQRPHTLDYIAALCEDFVELHGDRRFGDDPAMVGGMATFAGQTVMVIGHQKGNDTRENMRRNFGMPHPEGYRKAQRLMRHAEKFGLPVICFVDTPAADPTKSSEERGQANAIAESIMLMTTLRVPSIAVVIGEGGSGGALAISVADRILMQENAIYSVAPPEAAASILWRDAAKAPEAARALKLTAADLYDLRIIDEVIPEPPGGAHADRLTAITTVGERLRVHLADLQQRDIDTLLRERYRKYRSMGQYQEQQMDFFGRM

SEQ ID NO: 80 - protein, 180 aa, Chloroflexus aurantiacus
MMLWGAMKDETTELPADQPDPFGLAAVRVLLQMLEQSDVYEITIENGNAKLHVKRGQPGGVIYSAPLPTAPVPSPSLPATPVTPFVQPPPAPEGPPVEMPAGHTITAPMVGTFYAAPSPRDRPFVQEGDEVRVGDTVGIVEAMKMMNEIESDVAGRVARILVKNGQPVEYGQPLMVIEPL

SEQ ID NO: 81 - protein, 455 aa, Chloroflexus aurantiacus
MIRKVLVANRGEIAVRIIRACQELGIRTVVAYSTADRDSLAVRLADEAVCIGPPPAAKSYLNAPALISAALVSGCDAIHPGYGFLSENPYFAEMCADCKLTFIGPPPEPIRLMGDKAIGRETMRKAGVPTVPGSDGEVRSLEEAIDVARQIGYPVLLKPSGGGGGRGMRVAYDEADLQRAFPTARAEAEAAFGNGALLLEKYLTRVRHVEIQVLADQYGHAIHLGERDCSAQRRHQKIVEEAPSPAVTPELRERMGADAVRGIKSIGYVNAGTLEFLLDQDGNYYFIEMNTRIQVEHPVTEQVTGIDLVRWQLLIASGERLTLRQEDIKITRHAIECRINAEDPERDFLPASGEVEFYLPPGGPGVRVDSHLYSGYTPPGTYDSLLAKIITFGDTRDEALNRMRRALNECVITGIKTTIPFQLALIDDPEFRAGRIHTGYVAELLRQWKETLNPV

SEQ ID NO: 82 - protein, 305 aa, Chloroflexus aurantiacus
MKEFFRLSRKGFTGREDQDSAQIPDDLWVKCSSCRELIYKKQLNDNLKVCPKCGHHMRLSAHEWLGLLDVGSFREMDANLLPTDPLGFVTDEESYAAKLAKTQQRTGMADAVIAGIGAISNMQICVAVADFSFMGASMGSVYGEKMARSAERAAELGVPLLTINTSGGARQQEGVIGLMQMAKVTMALTRLADAGQPHIALLVDPCYGGVTASYPSVADIIIAEPGANIGFAGKRLIEQIMRQKLPAGFQTAEFMLEHGMIDMVVPRSEMRDTLARILRLYRQRSTSPAKAELAGRRATLPQPIM

SEQ ID NO: 83 - protein, 378 aa, Bacillus subtilis
MIIGVPKEIKNNENRVALTPGGVSQLISNGHRVLVETGAGLGSGFENEAYESAGAEIIADPKQVWDAEMVMKVKEPLPEEYVYFRKGLVLFTYLHLAAEPELAQALKDKGVTAIAYETVSEGRTLPLLTPMSEVAGRMAAQIGAQFLEKPKGGKGILLAGVPGVSRGKVTIIGGGVVGTNAAKMAVGLGADVTIIDLNADRLRQLDDIFGHQIKTLISNPVNIADAVAEADLLICAVLIPGAKAPTLVTEEMVKQMKPGSVIVDVAIDQGGIVETVDHITTHDQPTYEKHGVVHYAVANMPGAVPRTSTIALTNVTVPYALQIANKGAVKALADNTALRAGLNTANGHVTYEAVARDLGYEYVPAEKALQDESSVAGA

SEQ ID NO: 84 - protein, 505 aa, Schizosaccharomyces pombe
MFTDYPNDINCESPRMSDLDGFCQNAFSDLNSLNQQVFKANYAVRGALAILADEIQDDLLENPSSYPFSEIVYANIGNPQQMGQSPITFVRQVLSLCQYPTLLDHAEEKWFQNLFPTDVVQRSKMLLKESGSLGAYSASQGIPLVRRHVADFIRARDGFDCEPSDIYLTSGASHAARLIMTLIIARPTDGVMVPAPQYPLYGAQIDLMSGSMVSYSLSEENNWDIDFDQFKKSFDEASKKGINVRLCVVINPGNPTGACISENSMEKVLRFAKAKGIVLLADEVYQNNIYQNKFHSFRRKLGELREKEPDNHWDQVSLISVNSVSKGQFGECGQRGGYLDVVNIPEPAKDQILKLATIDICPPVAGQLLVDMLVNPPKPGDPSYDLFIKEVDEIHEALRLQCRQLYEGTKRMKRVSCLEPHGAMYLHPSVSLPEKLITTAKAQKIQPDEFYAIELLKRSGICVVPGSGFGQPEGDYHIRITFLAKGTEYIERFVKAHNEIMDLYE

SEQ ID NO: 85 - protein, 507 aa, Saccharomyces cerevisiae
MTMTHQQDLKGVFTAKDLDFKPAGKITKKDLNTGVTKAEYAVRGAIPTRADELKEELKKNPEVLPFDDIINANIGNPQQLDQKPLTFTRQVLAILEYPEILRVGHNELASLNLFSRDALERAERLLNDIGGSIGAYSHSQGVPGIRQTVADFITRRDGGEPATPEDIYLTTGASSAATSLLSLLCKDSQTGLLIPIPQYPLYTASASLFNAQVLPYYLDEESNWSTNSDEIEKVVQDALKKQIRPSVLIVINPGNPTGAVLSEETIARICLIAAKYGITIISDEVYQENIFNDVKFHSMKKVLRKLQHLYPGKFDNVQLASLHSISKGFMDECGQRGGYMEIIGFSQEIRDALFKLMSISICSVVTGQAVVDLMVKPPQPGDESYEQDHDERLKIFHEMRTRANLLYETFKELEGIECQKPQGAMYLFPRLVLPKKALCESERLGIEPDEFYCTSLLESTGICTVPGSGFGQRPGTYHVRTTFLAPGTKWIQDWKEFHQDFFSKYRN

SEQ ID NO: 86 - protein, 471 aa, Bacillus subtilis
MKNKWYKPKRHWKEIELWKDVPEEKWNDWLWQLTHTVRTLDDLKKVINLTEDEEEGVRISTKTIPLNITPYYASLMDPDNPRCPVRMQSVPLSEEMHKTKYDLEDPLHEDEDSPVPGLTHRYPDRVLFLVTNQCSMYCRYCTRRRFSGQIGMGVPKKQLDAAIAYIRETPEIRDCLISGGDGLLINDQILEYILKELRSIPHLEVIRIGTRAPVVFPQRITDHLCEILKKYHPVWLNTHFNTSIEMTEESVEACEKLVNAGVPVGNQAVVLAGINDSVPIMKKLMHDLVKIRVRPYYIYQCDLSEGIGHFRAPVSKGLEIIEGLRGHTSGYAVPTFVVDAPGGGGKIALQPNYVLSQSPDKVILRNFEGVITSYPEPENYIPNQADAYFESVFPETADKKEPIGLSAIFADKEVSFTPENVDRIKRREAYIANPEHETLKDRREKRDQLKEKKFLAQQKKQKETECGGDSS

SEQ ID NO: 87 - protein, 416 aa, Porphyromonas gingivalis
MAESRRKYYFPDVTDEQWNDWHWQVLNRIETLDQLKKYVTLTAEEEEGVKESLKVLRMAITPYYLSLIDPENPNCPIRKQAIPTHQELVRAPEDQVDPLSEDEDSPVPGLTHRYPDRVLFLITDKCSMYCRHCTRRRFAGQKDASSPSERIDRCIDYIANTPTVRDVLLSGGDALLVSDERLEYILKRLREIPHVEIVRIGSRTPVVLPQRITPQLVDMLKKYHPVWLNTHFNHPNEVTEEAVEACERMANAGIPLGNQTVLLRGINDCTHVMKRLVHLLVKMRVRPYYIYVCDLSLGIGHFRTPVSKGIEIIENLRGHTSGYAVPTFVVDAPGGGGKIPVMPNYVVSQSPRHVVLRNYEGVITTYTEPENYHEECDCEDCRAGKHKEGVAALSGGQQLAIEPSDLARKKRKFDKN

SEQ ID NO: 88 - protein, 425 aa, Fusobacterium nucleatum
MNTVNTRKKFFPNVTDEEWNDWTWQVKNRIEKIDDLKKYVELSAEEEEGVVRTLETLRMAITPYYFSLIDMNSDRCPIRKQAIPTIQEIHQSDADLLDPLHEDEDSPVPGLTHRYPDRVLLLITDMCSMYCRHCTRRRFAGSSDDAMPMDRIDKAIEYIAKTPQVRDVLLSGGDALLVSDKKLESIIQKLRAIPHVEIIRIGSRTPVVLPQRITPELCNMLKKYHPIWLNTHFNHPQEVTPEAKKACEMLADAGVPLGNQTVLLRGINDSVPVMKRLVHDLVMMRVRPYYIYQCDLSMGLEHFRTPVSKGIEIIEGLRGHTSGYAVPTFVVDAPGGGGKTPVMPQYVISQSPHRVVLRNFEGVITTYTEPENYTHEPCYDEEKFEKMYEISGVYMLDEGLKMSLEPSHLARHERNKKRAEAEGKK

SEQ ID NO: 89 - protein, 517 aa, Megasphaera elsdenii
MRKVEIITAEQAAQLVKDNDTITSIGFVSSAHPEALTKALEKRFLDTNTPQNLTYIYAGSQGKRDGRAAEHLAHTGLLKRAIIGHWQTVPAIGKLAVENKIEAYNFSQGTLVHWFRALAGHKLGVFTDIGLETFLDPRQLGGKLNDVTKEDLVKLIEVDGHEQLFYPTFPVNVAFLRGTYADESGNITMDEEIGPFESTSVAQAVHNCGGKVVVQVKDVVAHGSLDPRMVKIPGIYVDYVVVAAPEDHQQTYDCEYDPSLSGEHRAPEGATDAALPMSAKKIIGRRGALELTENAVVNLGVGAPEYVASVAGEEGIADTITLTVEGGAIGGVPQGGARFGSSRNADAIIDHTYQFDFYDGGGLDIAYLGLAQCDGSGNINVSKFGTNVAGCGGFPNISQQTPNVYFCGTFTAGGLKIAVEDGKVKILQEGKAKKFIKAVDQITFNGSYAARNGKHVLYITERCVFELTKEGLKLIEVAPGIDIEKDILAHMDFKPIIDNPKLMDARLFQDGPMGLKK

SEQ ID NO: 90 - protein, 145 aa, Clostridium propionicum
MVGKKVVHHLMMSAKDAHYTGNLVNGARIVNQWGDVGTELMVYVDGDISLFLGYKDIEFTAPVYVGDFMEYHGWIEKVGNQSYTCKFEAWKVATMVDITNPQDTRATACEPPVLCGRATGSLFIAKKDQRGPQESSFKERKHPGE

SEQ ID NO: 91 - protein, 260 aa, Phytophthora sojae
MAAEYESILTEVRGKVAIITLNRPKALNALCSPLIEELNGAAHAFDADPSIGAIVITGSGSKAFAAGADIKEMATKTFVDAYKSNMFANWGDITKVSKPVIAAVNGYALGGGCELAMLCDLIIAGDSAKFGQPEITLGTIPGCGGTQRLIRAVGKSKAMEMILTGNMIDAQQAERDGLVARVVPADQLLDEALKTANKIASFSQPVVKMAKEAVNAAYEQSLQEGLKYESRLFWSSFATKDQKEGMAAFVEKRKADFKDE

SEQ ID NO: 92 - protein, 258 aa, Chloroflexus aurantiacus
MSEESLVLSTIEGPIAILTLNRPQALNALSPALIDDLIRHLEACDADDTIRVIIITGAGRAFAAGADIKAMANATPIDMLTSGMIARWARIAAVRKPVIAAVNGYALGGGCELAMMCDIIIASENAQFGQPEINLGIIPGAGGTQRLTRALGPYRAMELILTGATISAQEALAHGLVCRVCPPESLLDEARRIAQTIATKSPLAVQLAKEAVRMAAETTVREGLAIELRNFYLLFASADQKEGMQAFIEKRAPNFSGR

SEQ ID NO: 93 - protein, 288 aa, Rhodospirillum rubrum
MAAAPGPPAARPRAARQSRMILPPLREQAQMAYENILVETNGKVGIVTLNRPKALNALSAGLVRDLGAALDAFEADVNVHVIVLTGSDKAFAAGADIKEMAEKSYMDAYLEDFITKGWERVTTCRKPIIAAVAGFALGGGCEMAMMCDFIIAAQNAKFGQPEINLGTLPGAGGTQRLTRFVGKSKAMDMCLTGRMMDADEAWKCGLVSRIVPVDDLKDEVLKIAEAIADKSLPITMMVKEAVNAAYETTLAQGVRFERRLFQASFATDDQKEGMNAFIEKRQPSFTDR

SEQ ID NO: 94 - protein, 258 aa, Rhodobacter capsulatus
MSYQTLIVEIADGVALIRLNRPEALNALNSQLLGELAAALSTLDADPAVRCFVLTGSDKAFAAGADIKEMADKSFVDMLKLDFFGTEGDAILRTRKPVIAAVAGYALGGGCELAMMCDFILCAENAKFGQPEINLGVVAGIGGTQRLTRFVGKSKSMEMHLTGRFMDAAEAERSGLVSRVLPLADLLPEALATARKIAEKSAIATMVAKDCVNRAYETTLREGVLYERRVFHALFATEDQKEGMAAFAEKRPAKFADK

SEQ ID NO: 95 - protein, 290 aa, Homo sapiens
MAALRVLLSCARGPLRPPVRCPAWRPFASGANFEYIIAEKRGKNNTVGLIQLNRPKALNALCDGLIDELNQALKIFEEDPAVGAIVLTGGDKAFAAGADIKEMQNLSFQDCYSSKFLKHWDHLTQVKKPVIAAVNGYAFGGGCELAMMCDIIYAGEKAQFAQPEILIGTIPGAGGTQRLTRAVGKSLAMEMVLTGDRISAQDAKQAGLVSKICPVETLVEEAIQCAEKIASNSKIVVAMAKESVNAAFEMTLTEGSKLEKKLFYSTFATDDRKEGMTAFVEKRKANFKDQ

SEQ ID NO: 96 - protein, 399 aa, Pseudomonas fluorescens
MRVVLCKFALLRSHDGSSANILIKNNKSRELSMTAQVSTEASHAAILQDEVLAEVRNHIGHLTLNRPAGLNALTLQMVRSLTSQLQAWSDDPQVYAVVLRGAGEKAFCAGGDIRSLYDSFKNGDTLHQDFFVEEYALDLAIHHYRKPVLALMDGFVLGGGMGLVQGADLRVVTERSRLAMPEVAIGYFPDVGGSYFLPRIPGELGIYLGVTGVQIRAADALYCGLADWYLDSHKLADLDQKLDNLRWHDSPLKDLQGALARLAVQQLPDAPLAALRPAIDHFFALPDVPSIVEQLQQVTVADSHEWALNTVSLMQTRSPLAMAVTLEMLRRGRRLSLEQCFALELHLDRQWFERGDLIEGVRALIIDKDKSPRWNPPTLHGLALNHVESFFHHFEKVVK

SEQ ID NO: 97 - protein, 351 aa, Bacillus cereus
MTEQVLFSVSENGVATITLNRPKALNSLSYDMLQPIGQKLKEWEHDERIALIVLKGAGTKGFCAGGDIKTLYEARSNEVALQHAERFFEEEYEIDTYIYQYTKPIIACLDGIVMGGGVGLTNGAKYRIVTERTKWAMPEMNIGFFPDVGAAYFLNKAPGYTGRFVALTASILKASDVLFINAADYFMTSDSLPEFLTELESVNWHKEDDVHTNLKEVIRTFATAPNLESELAPSLEVINSHFAFDTIEEIIHSLEKDESSFALKTKEILLSKSPISLKVTLKQFIDGQDKSVEECFATDLILAKNFMRHEDFFEGVRSVVVDKDQNPNYKYKQLSDVSEEDVNRFFNLLNA

SEQ ID NO: 98 - protein, 381 aa, Homo sapiens
MWRLMSRFNAFKRTNTILHHLRMSKHTDAAEEVLLEKKGCAGVITLNRPKFLNALTLNMIRQIYPQLKKWEQDPETFVIIIKGAGGKAFCAGGDIRVISEAEKAKQKIAPVFFREEYMLNNAVGSCQKPYVALIHGITMGGGVGLSVHGQFRVATEKCLFAMPETAIGLFPDVGGGYFFATTPRKTWLLPCINGFRLKGRDVYRAGIATHFVDSEKLAMLEEDLLALKSPSKENIASVLENYHTESKIDRDKSFILEEHMDKINSCFSANTVEEIIENLQQDGSSFALEQLKVINKMSPTSLKITLRQLMEGSSKTLQEVLTMEYRLSQACMRGHDFHEGVRAVLIDKDQSPKWKPADLKEVTEEDLNNHFKSLGSSDLKF

SEQ ID NO: 99 - protein, 261 aa, Megasphaera elsdenii
VKTVYTLGIDVGSSSSKAVILEDGKKIVAHAVVEIGTGSTGPERVLDEVFKDTNLKIEDMANIIATGYGRFNVDCAKGEVSEITCHAKGALFECPGTTTILDIGGQDVKSIKLNGQGLVMQFAMNDKCAAGTGRFLDVMSKVLEIPMSEMGDWYFKSKHPAAVSSTCTVFAESEVISLLSKNVPKEDIVAGVHQSIAAKACALVRRVGVGEDLTMTGGGSRDPGVVDAVSKELGIPVRVALHPQAVGALGAALIAYDKIKK

SEQ ID NO: 100 - protein, 428 aa, Megasphaera elsdenii
MSEEKTVDIESMSSKEALGYFLPKVDEDARKAKKEGRLVCWSASVAPPEFCTAMDIAIVYPETHAAGIGARHGAPAMLEVAENKGYNQDICSYCRVNMGYMELLKQQALTGETPEVLKNSPASPIPLPDVVLTCNNICNTLLKWYENLAKELNVPLINIDVPFNHEFPVTKHAKQYIVGEFKHAIKQLEDLCGRPFDYDKFFEVQKQTQRSIAAWNKIATYFQYKPSPLNGFDLFNYMGLAVAARSLNYSEITFNKFLKELDEKVANKKWAFGENEKSRVTWEGIAVWIALGHTFKELKGQGALMTGSAYPGMWDVSYEPGDLESMAEAYSRTYINCCLEQRGAVLEKVVRDGKCDGLIMHQNRSCKNMSLLNNEGGQRIQKNLGVPYVIFDGDQTDARNFSEAQFDTRVEALAEMMADKKANEGGNH

SEQ ID NO: 101 - protein, 372 aa, Megasphaera elsdenii
MSQIDELISKLQEVSNHPQKTVLNYKKQGKGLVGMMPYYAPEEIVYAAGYLPVGMFGSQNPQISAARTYLPPFACSLMQADMELQLNGTYDCLDAVIFSVPCDTLRCMSQKWHGKAPVIVFTQPQNRKIRPAVDFLKAEYEHVRTELGRILNVKISDLAIQEAIKVYNENRQVMREFCDVAAQYPQIFTPIKRHDVIKARWFMDKAEHTALVRELIDAVKKEPVQPWNGKKVILSGIMAEPDEFLDIFSEFNIAVVADDLAQESRQFRTDVPSGIDPLEQLAQQWQDFDGCPLALNEDKPRGQMLIDMTKKYNADAVVICMMRFCDPEEFDYPIYKPEFEAAGVRYTVLDLDIESPSLEQLRTRIQAFSEIL

SEQ ID NO: 102 - protein, 519 aa, Saccharomyces cerevisiae
MFSRSTLCLKTSASSIGRLQLRYFSHLPMTVPIKLPNGLEYEQPTGLFINNKFVPSKQNKTFEVINPSTEEEICHIYEGREDDVEEAVQAADRAFSNGSWNGIDPIDRGKALYRLAELIEQDKDVIASIETLDNGKAISSSRGDVDLVINYLKSSAGFADKIDGRMIDTGRTHFSYTKRQPLGVCGQIIPWNFPLLMWAWKIAPALVTGNTVVLKTAESTPLSALYVSKYIPQAGIPPGVINIVSGFGKIVGEAITNHPKIKKVAFTGSTATGRHIYQSAAAGLKKVTLELGGKSPNIVFADAELKKAVQNIILGIYYNSGEVCCAGSRVYVEESIYDKFIEEFKAASESIKVGDPFDESTFQGAQTSQMQLNKILKYVDIGKNEGATLITGGERLGSKGYFIKPTVFGDVKEDMRIVKEEIFGPVVTVTKFKSADEVINMANDSEYGLAAGIHTSNINTALKVADRVNAGTVWINTYNDFHHAVPFGGFNASGLGREMSVDALQNYLQVKAVRAKLDE

SEQ ID NO: 103 - protein, 495 aa, Escherichia coli
MNFHHLAYWQDKALSLAIENRLFINGEYTAAAENETFETVDPVTQAPLAKIARGKSVDIDRAMSAARGVFERGDWSLSSPAKRKAVLNKLADLMEAHAEELALLETLDTGKPIRHSLRDDIPGAARAIRWYAEAIDKVYGEVATTSSHELAMIVREPVGVIAAIVPWNFPLLLTCWKLGPALAAGNSVILKPSEKSPLSAIRLAGLAKEAGLPDGVLNVVTGFGHEAGQALSRHNDIDAIAFTGSTRTGKQLLKDAGDSNMKRVWLEAGGKSANIVFADCPDLQQAASATAAGIFYNQGQVCIAGTRLLLEESIADEFLALLKQQAQNWQPGHPLDPATTMGTLIDCAHADSVHSFIREGESKGQLLLDGRNAGLAAAIGPTIFVDVDPNASLSREEIFGPVLVVTRFTSEEQALQLANDSQYGLGAAVWTRDLSRAHRMSRRLKAGSVFVNNYNDGDMTVPFGGYKQSGNGRDKSLHALEKFTELKTIWISLEA

SEQ ID NO: 104 - protein, 495 aa, Klebsiella pneumoniae
MNFQHLAYWQEKAKNLAIETRLFINGEYCAAADNTTFETIDPAAQQTLAQVARGKKADVERAVKAARQAFDNGDWSQASPAQRKAILTRFADLMEAHREELALLETLDTGKPIRHSLRDDIPGAARAIRWYAEALDKVYGEVAPTGSNELAMIVREPIGVIAAVVPWNFPLLLACWKLGPALAAGNSVILKPSEKSPLTALRLAGLAKEAGLPDGVLNVVSGFGHEAGQALALHPDVEVITFTGSTRTGKQLLKDAGDSNMKRVWLEAGGKSANIVFADCPDLQQAVRATAGGIFYNQGQVCIAGTRLLLEESIADEFLARLKAEAQHWQPGNPLDPDTTMGMLIDNTHADNVHSFIRGGESQSTLFLDGRKNPWPAAVGPTIFVDVDPASTLSREEIFGPVLVVTRFKSEEEALKLANDSDYGLGAAVWTRDLSRAHRMSRRLKAGSVFVNNYNDGDMTVPFGGYKQSGNGRDKSLHALEKFTELKTIWIALES

SEQ ID NO: 105 - DNA, 1053 bp, Issatchenkia orientalis
atgtcttacgaaatcccacaaacacaaaaggcctgtgtcttttacgaaaacggcggcccaatcacatacaaggacattccagttccaaagccaaaacctactgagattttagtcaaggttctgtactctggtgtctgccacaccgacttgcacgcatggaagggtgactggcctctagctaccaagttgccattggttggtggtcacgaaggtgccggtgttgttgttgccaagggtgaaaacgtcacctcttttgagattggtgattacgcaggtatcaagtggttgaatggttcatgtatgggttgtgaattctgtgaacaaggtgctgaaccaaactgtcctaaggccgacttgagtggttacacccacgacggttccttccaacagtatgctactgctgacgctattcaagctgcacacatctccaaggaaaccgacttggctggtgttgctccaatcttgtgtgcaggtgtcactgtctacaaggctttaaagactgcagaccttagagcaggtgaatgggtttgtatttccggtgcagctggtggtttaggttctcttgctattcaatatgcaaaggctatgggtctgagagttgttggtattgacggtggtgacgaaaagaaggaattgtgtaaatcccttggtgctgaagcatttattgatttcacaaagaccaaggatatcgtcaaggctgtccaagaggcaaccaatggtggtccacatggtgtcatcaatgtctctgtctctgaagctgcaatttctcaatcttgtgaatacgttagacctctaggtaaggttgttcttgttggtttaccagcaggcgcacaagtcaaaactggtgtctttgaagccgttgtcaagtctattgaaattaagggttcttatgtcggtaacagaaaggataccgccgaagcacttgacttctacactagaggcttggtcaagtctccattcaagattgtcggtttatccgaattgccaaaagtctttgaactcatggaacagggtaagattttaggtagaatggtcttagacacctccaaataa

SEQ ID NO: 106 - protein, 350 aa, Issatchenkia orientalis
MSYEIPQTQKACVFYENGGPITYKDIPVPKPKPTEILVKVLYSGVCHTDLHAWKGDWPLATKLPLVGGHEGAGVVVAKGENVTSFEIGDYAGIKWLNGSCMGCEFCEQGAEPNCPKADLSGYTHDGSFQQYATADAIQAAHISKETDLAGVAPILCAGVTVYKALKTADLRAGEWVCISGAAGGLGSLAIQYAKAMGLRVVGIDGGDEKKELCKSLGAEAFIDFTKTKDIVKAVQEATNGGPHGVINVSVSEAAISQSCEYVRPLGKVVLVGLPAGAQVKTGVFEAVVKSIEIKGSYVGNRKDTAEALDFYTRGLVKSPFKIVGLSELPKVFELMEQGKILGRMVLDTSK

SEQ ID NO: 107 - DNA, 1131 bp, Issatchenkia orientalis
atgtttgcatcaaccttcagaagtcaagctgtaagagctgcaagatttactagattccaatccacttttgccattcctgagaagcaaatgggtgttatctttgaaactcatggtggtcctttacaatacaaggaaattccagttccaaaaccaaaaccaactgaaattttaatcaatgttaaatactctggtgtctgccataccgatttacacgcatggaaaggtgactggccattaccagcaaagttacccctagttggtggtcacgaaggtgcgggcattgttgttgcgaaaggttctgcagttaccaactttgagattggcgattatgctggtattaagtggttaaacggttcatgtatgtcatgtgaattctgtgaacaaggtgatgaatctaactgtgaacatgccgatttgagtggttatactcatgatggttctttccaacaatatgccactgctgacgctattcaagctgcaaagatcccaaagggtaccgacttatctgaagttgcgccaattttatgtgctggtgttactgtctataaagctttgaaaactgctgatttaagagcaggtcaatgggttgcgatttctggtgccgctggtggtctaggttctcttgctgtccaatatgcaaaggcaatgggtctaagagttttaggtatcgatggtggtgaaggtaaaaaggaactttttgaacaatgtggtggtgatgtgtttatcgatttcaccagatacccaagagatgcacctgaaaagatggttgctgatattaaggctgcaactaacggtttgggtccacacggtgttatcaatgtctctgtctccccagctgctatctctcaatcatgtgactatgttagagcaactggtaaggttgtccttgtcggtatgccatctggtgctgtctgtaagtctgatgtcttcactcatgttgttaaatccttacaaattaaaggttcttatgttggtaacagagcagataccagagaagctttggaattctttaatgaaggtaaggtcagatctccaatcaaggttgtcccattatctactttacctgaaatttacgaattgatggagcaaggtaagattttaggtagatacgttgttgatacttctaaataa

SEQ ID NO: 108 - protein, 376 aa, Issatchenkia orientalis
MFASTFRSQAVRAARFTRFQSTFAIPEKQMGVIFETHGGPLQYKEIPVPKPKPTEILINVKYSGVCHTDLHAWKGDWPLPAKLPLVGGHEGAGIVVAKGSAVTNFEIGDYAGIKWLNGSCMSCEFCEQGDESNCEHADLSGYTHDGSFQQYATADAIQAAKIPKGTDLSEVAPILCAGVTVYKALKTADLRAGQWVAISGAAGGLGSLAVQYAKAMGLRVLGIDGGEGKKELFEQCGGDVFIDFTRYPRDAPEKMVADIKAATNGLGPHGVINVSVSPAAISQSCDYVRATGKVVLVGMPSGAVCKSDVFTHVVKSLQIKGSYVGNRADTREALEFFNEGKVRSPIKVVPLSTLPEIYELMEQGKILGRYVVDTSK

SEQ ID NO: 109 - DNA, 1134 bp, Issatchenkia orientalis
atgttatccaagaccatcactgctgcattgaggggcaatacaactcgtactgcattcagaatcaatgccattagaagtttagcgatcccagctattccagagacacaaaagggtgttatcttttatgagaacggaggtgaactattttacaaggacattccagttccaaagccaaagccaaatgagattttggtgaatgtcaagtattctggtgtttgtcataccgatttacacgcatggaaaggtgactggcctttggcgaccaagttgccattggttggtggacatgaaggtgccggagttgttgttgctaagggggacaatgtcaccaactttgaaattggcgattatgccggtatcaagtggttgaatggttcatgtatggggtgtgaattttgccaacaaggtgcagagccaaactgtccacaggccgacttgagtggttacacccatgacgggtcctttcaacaatatgccactgccgatgctgttcaggcagccaagattcctcagggcactgatttggctcaagttgcgccaattttatgtgcaggtattactgtctataaggctttaaagactgcagaattaagaccaggtcaatgggttgccatttctggtgctgctggaggtttaggttctcttgctgttcaatatgccaaggccatgggtttgagagttttgggtattgatggtggtgaggagaagggcaagtttgcaaagtctcttggagctgaagttttcattgatttcaccaaatccaaggacattgtcaaggatatccaagaggccaccaatggtggtccacatggtgtcattaatgtttctgtttctccagctgctatttctcaaagtacccagtatgtcagaaccttgggtaaggttgtccttgttggattaccagcgcatgctgtatgcgagtcttcggttttcgaccatgttgtcaagtcgattcaaattagaggctcttatgttggtaacagggaagatactagtgaggctattgattttttcaccaggggtttagtgaagtcaccaattaagattgttggtttgagtgagttgccaaagatctatgaattgatggagcaaggtaagattttaggcagatatgttgttgacacttcgaaatga

SEQ ID NO: 110 - protein, 377 aa, Issatchenkia orientalis
MLSKTITAALRGNTTRTAFRINAIRSLAIPAIPETQKGVIFYENGGELFYKDIPVPKPKPNEILVNVKYSGVCHTDLHAWKGDWPLATKLPLVGGHEGAGVVVAKGDNVTNFEIGDYAGIKWLNGSCMGCEFCQQGAEPNCPQADLSGYTHDGSFQQYATADAVQAAKIPQGTDLAQVAPILCAGITVYKALKTAELRPGQWVAISGAAGGLGSLAVQYAKAMGLRVLGIDGGEEKGKFAKSLGAEVFIDFTKSKDIVKDIQEATNGGPHGVINVSVSPAAISQSTQYVRTLGKVVLVGLPAHAVCESSVFDHVVKSIQIRGSYVGNREDTSEAIDFFTRGLVKSPIKIVGLSELPKIYELMEQGKILGRYVVDTSK

SEQ ID NO: 111 - DNA, 1347 bp, Issatchenkia orientalis
atgtctccttcacaaattaacgttgacaacttatctaattggactgaagaattcaaatctgacgccaagactcaaatcgggggttctgtattgcaacattccaacattgatgaggtcttgattaacagagatgcagaaatcgccaacaagcatatcttcaaccacaagattgaaattgaaggtctacctgtcatggatcagaaggcttctggtagatgttggttgtttgcatcgactaacttgatgcgtgttactgcaatgaagaaatacaatttgaaggaaatcaagctttccccatcgtatttgtttttctatgacaaattggaaagagcaaactatttccttgaacaaatcatcgacactcataaggaaccaatcgattcaagattggttcaatatttcctgaccaatccagttgaagatggtggtcaattcaccatgatggcacaaattgctaccaaatacggtgttgttcctgatcaagtctacccagattctttcaacacaaccacttcgaggattatgaacagattagtcaaccacagattacgttcttatgcaatgactttacgtaacgctctagatgaaggtaaagatgtaatgtccttgaagaatgagatgcaaaaagaaatttatcgtttgctaacaatgttccttggtaacccaccaaagccaaacgaagagtttgtctgggaattcaccgataaagatggtaaatatgaatctattaaaactacaccattaaaatatgcaactgaagttttggatttccatgctccagaatatgtttccttgttaaatgacccaagaaataagtataacaagatggttcaagttgaaagattaggtaatgttgctggtggcgaaccagttgcatacttaaacttagaaattgaaaagttatctcaagctgttgttaacagaatcaaaaataacaaaccagttttctttggtaccgatacacctaaatttatggataaaagtagaggtattatggatatcaatttatgggactatgagttattaggttatgatgtccgtaccatgtcaaagaaggaaagagttgtttttggtgattctttaatgacccacgctatgttgattactgcagtgcacgttgatgaaaatggcaaacctgtcagatacagagtcgaaaacagttggggtaccaagagtggtcaagaaggttattacacaatgacccaagaatattttgaagagtacgtttatcaagtagtcattgaaaagagtgaatttgctgccctaaacctcgatgtttccattctggaggataaagaaccagtcgtcttgccaccttatgaccctatgggtgcacttgctttataa

SEQ ID NO: 112 - protein, 448 aa, Issatchenkia orientalis
MSPSQINVDNLSNWTEEFKSDAKTQIGGSVLQHSNIDEVLINRDAEIANKHIFNHKIEIEGLPVMDQKASGRCWLFASTNLMRVTAMKKYNLKEIKLSPSYLFFYDKLERANYFLEQIIDTHKEPIDSRLVQYFLTNPVEDGGQFTMMAQIATKYGVVPDQVYPDSFNTTTSRIMNRLVNHRLRSYAMTLRNALDEGKDVMSLKNEMQKEIYRLLTMFLGNPPKPNEEFVWEFTDKDGKYESIKTTPLKYATEVLDFHAPEYVSLLNDPRNKYNKMVQVERLGNVAGGEPVAYLNLEIEKLSQAVVNRIKNNKPVFFGTDTPKFMDKSRGIMDINLWDYELLGYDVRTMSKKERVVFGDSLMTHAMLITAVHVDENGKPVRYRVENSWGTKSGQEGYYTMTQEYFEEYVYQVVIEKSEFAALNLDVSILEDKEPVVLPPYDPMGALAL

SEQ ID NO: 113 - DNA, 1737 bp, Issatchenkia orientalis
atgttactcagatcactaaactcttctgctcgttgtgtcaaacaaacaaccagaacaaaggttaggtatctcagccacgtcagtggtgcaagcatggcgaaacctacattgaagaacaactcgagagaatccaacaaatccagaaactatctaattgctgctgtgacagcattggctgtatcaacctcaattggagttgccgtacatgtgaaggaccccttgtataacgatgctaccggcagtgattctccgagaagtatatctgttgacgagtttgtcaagcataattcacaaaacgactgttggattgcaatcaatggcaaggtttatgatttcactgattttattccaaaccatccaggtggggtacctccattagttaatcatgctggttatgatggtactaaactttatgagaaattgcatccaaaaggtacaattgagaaattcttgccaaaggataagtttctgggtgtgttagatggtgaagcgccaaaattggaagcagactatttggtggacgatgatgaacaagagagactggattatttgaacaacttacctcctttgtcatctattcagaatgtttatgatttcgaatacttggccaagaagattttacctaaagatgcctgggcatattattcttgtggtgccgatgatgaaatcacaatgagagaaaaccattatgcttatcaaagagtttatttcagaccaagaatttgtgttgatgtcaaggaagttgatacttcttatgaaatgttaggcactaaaacctctgttcctttttatgtatctgccaccgctttggctaaattaggccatcctgatggtgaatgctcaattgctagaggcgctggtaaggaaggtgtcgttcaaatgatttcgaccctttcctcaatgtcattagatgaaattgccgctgctagaattccaggtgcaacccaatggttccaattatacattaatgaggatagaaatgtcgctaaaggtctggtcaaacatgcagaagacttgggtatgaaggctatctttataactgttgatgctccttctctaggtaacagagaaaaggataaaagattaaagtttgttaatgacaccgatgtcgatttgggtgattccgcagatcgaaacagtggtgcttcaaaggcactatcttcgttcattgatgcttctgtctcttggaatgacgtcaaagcggtcaagtcgtggactaaattgcctgtcttagttaaaggtgttcaaacagttgaagacgttattgaagcttacgatgctggttgtcaaggtgttgttttgtcaaaccacggtggtaggcaactagatactgctcctcctccaatcgaattattagctgaaactgttccaactttgaagagattgggtaaattaagaccagattttgaaattttaattgacggtggtgtcaaaagaggtaccgatattttgaaagcagtcgcaatcggtggccaagatgtcagagtttcagttggtatgggtagacctttcttatatgccaactcttgctatggtgaagcaggtgttagaaaattaattcaaaatctaaaggatgaattagaaatggatatgagattgttgggtgtcactaaaatggaccagctatcttcgaaacatgtcgatactaaacgtttgattggtagagatgcgatcaactatttgtatgataatgtatacagcccaatcgaaaccgttaaattcaacaatgaagattga

SEQ ID NO: 114 - protein, 578 aa, Issatchenkia orientalis
MLLRSLNSSARCVKQTTRTKVRYLSHVSGASMAKPTLKNNSRESNKSRNYLIAAVTALAVSTSIGVAVHVKDPLYNDATGSDSPRSISVDEFVKHNSQNDCWIAINGKVYDFTDFIPNHPGGVPPLVNHAGYDGTKLYEKLHPKGTIEKFLPKDKFLGVLDGEAPKLEADYLVDDDEQERLDYLNNLPPLSSIQNVYDFEYLAKKILPKDAWAYYSCGADDEITMRENHYAYQRVYFRPRICVDVKEVDTSYEMLGTKTSVPFYVSATALAKLGHPDGECSIARGAGKEGVVQMISTLSSMSLDEIAAARIPGATQWFQLYINEDRNVAKGLVKHAEDLGMKAIFITVDAPSLGNREKDKRLKFVNDTDVDLGDSADRNSGASKALSSFIDASVSWNDVKAVKSWTKLPVLVKGVQTVEDVIEAYDAGCQGVVLSNHGGRQLDTAPPPIELLAETVPTLKRLGKLRPDFEILIDGGVKRGTDILKAVAIGGQDVRVSVGMGRPFLYANSCYGEAGVRKLIQNLKDELEMDMRLLGVTKMDQLSSKHVDTKRLIGRDAINYLYDNVYSPIETVKFNNED

SEQ ID NO: 115 - DNA, 1698 bp, Issatchenkia orientalis
  misc_feature (941)..(941): N= A, C, T, or G
  misc_feature (943)..(943): N= A, C, T, or G
atgttaagatcccagttcaaaaacattttgaaaaatgttaacaagaaccattctctaaggagaacttttacttccagcacctcaaaggctggaaaaaatgcttcatacaatgccaagattatatctgcaaccgtggcctcgattgttgcagcagctggctcttatatgttggtccagccttcactagctaatgatgaggcacagtctgctaatccaactaggaagatctctgttgacgaatttgttaaacacaaccatgccgatgattgttggatcactgttaacggtaacgtctatgacttgactgatttcatttcaatgcatccaggtggtactaccccattgattcaaaatgcaggtcacgacgcaactgaaatttacaacaagattcatccaaagggtacaatcgagaacttcttaccaaaggaaaagcaattgggtgttttggatggtgaagctcctaaaatcgaagttgtgcttgacgaaaaggagaaacacagattggagttgttgaatcatctccctgctctttccagaattcaaaacatttatgatttcgaacatattgcttctagagttttgagcgaccaagcatggaactactattcatgtggtgccgaagatgaaatcaccttgagggaaaatcattatgcttaccaaagaatctactttaagccaaaatgttgtgtcaatgttgcagaagttgatacctctcatgaaattttaggtacaaaagcttctgttcctttctacgtttccgcagccgcttctgcaaagttggggcacgaggatggtgaatgttccattgctagaggtgcaggtaaggaaggcgttattcaaatgatttcttccttctcttccaactctttggaggaaattgcagaatccagaattcctggtgcaacacaatggtttcaattatacgttaatgaagacaaggntnttgtgaagaagactttaaaaagggccgaaaacttgggtatgaaggccatctttgtcactgtggacgctgctagtagaggtaatagagaaaaagacattacaatgagaattaccgaagatacagatgagttaatagacgattcttctgttagagctggttctacctctggtgcattgccagctttcattgacaagaggctgacttgggatgaagttaaggatatcatttcatggaccaagttaccagttttgctgaagggtgttcaaagaactgatgatattgagaaggcaattgatattggttgtaagggtgttgtcttgtccaatcatggtggtagacaattagatacttctcctcctccaatagaagttatggctgaatctgttccaatcctaaagcaaaagggtaaactggatccaaatttcagtattttcgttgatggtggtgttagaagaggtacagatattttgaaagctttggctattggtggcagagactgtaaagttgctgttggtctgggtagacctttcctttatgcaaatactggttatggtgaaaagggtgtcagaaaggccgtgcaaattctaagagaagaattaaaggctgacatgagaatgttgggcgttacctctttgaacgagctagacgactcttacattgacaccagaagattactaggtagagatgctgttaaccacatatacaacaacaactactacccaatgtctaagattcaattcaaaaacgaaaaataa

SEQ ID NO: 116 - protein, 565 aa, Issatchenkia orientalis
  MISC_FEATURE (314)..(314): Xaa = Asp, Gly, Ala, or Val
  MISC_FEATURE (315)..(315): Xaa = Ile, Val, Leu, or Phe
MLRSQFKNILKNVNKNHSLRRTFTSSTSKAGKNASYNAKIISATVASIVAAAGSYMLVQPSLANDEAQSANPTRKISVDEFVKHNHADDCWITVNGNVYDLTDFISMHPGGTTPLIQNAGHDATEIYNKIHPKGTIENFLPKEKQLGVLDGEAPKIEVVLDEKEKHRLELLNHLPALSRIQNIYDFEHIASRVLSDQAWNYYSCGAEDEITLRENHYAYQRIYFKPKCCVNVAEVDTSHEILGTKASVPFYVSAAASAKLGHEDGECSIARGAGKEGVIQMISSFSSNSLEEIAESRIPGATQWFQLYVNEDKXXVKKTLKRAENLGMKAIFVTVDAASRGNREKDITMRITEDTDELIDDSSVRAGSTSGALPAFIDKRLTWDEVKDIISWTKLPVLLKGVQRTDDIEKAIDIGCKGVVLSNHGGRQLDTSPPPIEVMAESVPILKQKGKLDPNFSIFVDGGVRRGTDILKALAIGGRDCKVAVGLGRPFLYANTGYGEKGVRKAVQILREELKADMRMLGVTSLNELDDSYIDTRRLLGRDAVNHIYNNNYYPMSKIQFKNEK

SEQ ID NO: 117 - DNA, 1167 bp, Issatchenkia orientalis
atggtgtcccctgctgaaagattatctactattgcgtccacaatcaagccaaacagaaaagattctacatcattacaaccagaagactatccggaacatccgttcaaggtgacggttgttggttccggtaactgggggtgtacaattgccaaggttatagcggaaaacaccgttgagagacctcgtcaatttcaaagagatgttaatatgtgggtctatgaagaattgattgaaggcgaaaagttgactgaaatcataaataccaaacacgaaaacgtcaagtacttgccaggtatcaagttgccagttaacgttgttgcagttccagacattgttgaggcttgtgcaggctcagacttgattgtctttaatattcctcaccaatttttaccaagaattttatcccaattaaagggtaaggtgaatccaaaggctagagcaatttcttgtttgaaaggtttggatgtcaatcctaatggatgtaagttgctctccactgttattactgaagagttgggtatttattgtggtgccttatcaggtgctaatttagctcctgaagttgcacaatgtaaatggtcggaaacaactgttgcatatacaattccggacgatttcagaggtaaaggcaaggatattgaccatcaaattctaaagagtttgttccatagaccttatttccatgttcgtgttattagtgatgttgcaggtatttccattgccggtgcactcaagaatgtcgttgctatggctgctggatttgtcgaaggtttaggttggggtgataatgcaaaggctgcagtcatgagaataggtttggtggaaaccattcaatttgccaagacttttttcgatggctgtcatgctgcaacctttactcatgaatctgcaggtgttgccgacctaatcactacctgtgccggcggccgtaacgttagagttggtagatatatggcacaacattctgtctctgcaacggaggctgaagaaaagttgttgaatggccaatcctgtcaaggtatccacacaactagggaagtttacgagttcctctccaacatgggcaggacagatgagttcccactatttaccaccacctaccgtatcatctacgaaaacttcccaattgagaagctgccagaatgccttgaacctgtggaagattaa

SEQ ID NO: 118 - protein, 388 aa, Issatchenkia orientalis
MVSPAERLSTIASTIKPNRKDSTSLQPEDYPEHPFKVTVVGSGNWGCTIAKVIAENTVERPRQFQRDVNMWVYEELIEGEKLTEIINTKHENVKYLPGIKLPVNVVAVPDIVEACAGSDLIVFNIPHQFLPRILSQLKGKVNPKARAISCLKGLDVNPNGCKLLSTVITEELGIYCGALSGANLAPEVAQCKWSETTVAYTIPDDFRGKGKDIDHQILKSLFHRPYFHVRVISDVAGISIAGALKNVVAMAAGFVEGLGWGDNAKAAVMRIGLVETIQFAKTFFDGCHAATFTHESAGVADLITTCAGGRNVRVGRYMAQHSVSATEAEEKLLNGQSCQGIHTTREVYEFLSNMGRTDEFPLFTTTYRIIYENFPIEKLPECLEPVED

SEQ ID NO: 119 - DNA, 1566 bp, Issatchenkia orientalis
atgttgtccctctctaaacagtcaagaaactttttcaaattgaactatttttcagtcacccaaatagcaaaaatgtctgcaacttccgtcactttcccaattatcaacgaaacttaccaacagccaaccgggcttttcatcaacaatgaatttgttagtgcaaagtcaggtaagacttttgatgttaacaccccaattgatgagtctctcatttgtaaagtccaacaggccgatgctgaagatgttgaaattgccgttcaagcagcatctaaagcttacaagacttggagatttacaccgccaaatgaaagaggcagatacttgaacaaattggccgatttgatggacgaaaagagagacttacttgccaaaattgaatcccttgataatggtaaggccttacattgtgcaaaattcgatgtcaatcttgtcattgaatatttcagatactgtgcaggttactgtgataaaatcgatggtagaacaattacaaccgatgtagaacattttacctacactagaaaggaacctttaggtgtctgtggtgcaattacaccttggaacttcccattgctgatgtttgcttggaaaatcggcccggctttagcaaccggtaataccattatcttgaagcctgccagtgcaacacctctatcaaacctctttacttgtaccttgatcaaggaggcgggcattccagccggtgttgttaatgttgttccaggttccggtagaggctgtggtaactccattttacaacatcctaaaattaagaaggttgcgtttaccggatctacagaagttggtaaaactgttatgaaggaatgtgctaattccatcaaaaaggttactctcgaattgggtggtaagtctccaaacattgttttcaaagactgtaacgttgaacaaaccattcaaaatttgattactggtattttcttcaatggtggtgaagtctgttgtgctggttctagaatttacattgaagcaaccgatgagaaatggtatactgaattcttgaccaaattcaaggagactgttgaaaaattaaagattggtaacccatttgaagagggtgttttccaaggtgcacaaaccactccagatcaattccaaactgtcttggactacatcaccgctgctaacgaatccagcttgaaactattaactggtggtaaaagaattggcaataagggatactttgttgagccaactatcttctacgatgttcctcaaaattccaagttaactcaagaagaaatctttggtccagttgctgttgttttacctttcaagtccactgaagaattgattgaaaaggcaaatgattccgattttggcttaggttccggtattcacactgaagatttcaacaaggcaatttgggtttccgaaaggcttgaagcaggttctgtttggatcaacacttacaatgatttccacccagctgctccattcggtggttacaaggaatccggtattggcagagaaatgggtattgaagctttcgacaactatactcaaaccaagttagttagagctagagttaacaagccagctttttag

SEQ ID NO: 120 - protein, 521 aa, Issatchenkia orientalis
MLSLSKQSRNFFKLNYFSVTQIAKMSATSVTFPIINETYQQPTGLFINNEFVSAKSGKTFDVNTPIDESLICKVQQADAEDVEIAVQAASKAYKTWRFTPPNERGRYLNKLADLMDEKRDLLAKIESLDNGKALHCAKFDVNLVIEYFRYCAGYCDKIDGRTITTDVEHFTYTRKEPLGVCGAITPWNFPLLMFAWKIGPALATGNTIILKPASATPLSNLFTCTLIKEAGIPAGVVNVVPGSGRGCGNSILQHPKIKKVAFTGSTEVGKTVMKECANSIKKVTLELGGKSPNIVFKDCNVEQTIQNLITGIFFNGGEVCCAGSRIYIEATDEKWYTEFLTKFKETVEKLKIGNPFEEGVFQGAQTTPDQFQTVLDYITAANESSLKLLTGGKRIGNKGYFVEPTIFYDVPQNSKLTQEEIFGPVAVVLPFKSTEELIEKANDSDFGLGSGIHTEDFNKAIWVSERLEAGSVWINTYNDFHPAAPFGGYKESGIGREMGIEAFDNYTQTKLVRARVNKPAF

SEQ ID NO: 121 - DNA, 1506 bp, Issatchenkia orientalis
atgtcagcactgttcagaaccattgagactccaaacggtaaaaccctggaacaaccactgggtctcttcatcgacaatgagtgggtgaaaacaaaccgtacttttgagaccattaatccgtccacaggtgaggcgatctgtcatgtttaccgtgctggggtccaggaggtgaacgacgctgtcgaagctgcaaatagagcatttagaaacgaatcttggtcaggtctaactggttctcaacgtggcgatttactgtatcgcatgtaccaagttatcaaaagagacgccgagagcattgcatcgattgagtccatggataatggtaaaccgtatgctgcagaatgcctagatggagatttaggtgaagctgctgacgttttcaaatattatgccggttgggccgacaagatcaccggtgaactcattggctcgagtgtattgggtaagaataagatgtgttatgtcgagcctacaccactgggtgccgttggcggtatagtcccttggaatttcccgtttaccatgatggcatggaaaattgccccggcactggcgacgggttgtacagtggttatgaagtcaagtgaagtcacaccgttgacggcattatggtatggcaagattgcacttgaagtgggtctacctaaaggtgtacttaacatcctctccggttttggatcggatgttggatcggccatggcttcacatccaaagttggctaagatagcgttcactggctcaactgcaactggtaaaaaaatcatggaagcagcaggtggttccaacttgaaaaaggttacactagagtgtggtggtaaatctccttacattgtttttgatgatgctgacttagaattggcagtagaatgggcatattggggtatttggtataacaaaggtgaggtttgtacttcaacttcgagatttttgattcaggaagacatttacgataagtttgttgagagttttgttgagttgaccaagacgagagcaatcactgctgatccgtttgatgatagatgcactatcgggcctttggtttctagctcacagtacgaaaaagtcaaaaagtacgttgaaataggtaaaaatgaaggagcaaagctactaactggcaaattcatcgacgggccaggctatttctgtgagccatttatcttcagtgaatgcactgacgatatgacaatcatgaaagaggaaatctttggccctgttgtggggattactaaattctcaacggttaaagaggcgatcgagagagccaatgctacgacttacggtttaggagctgcgttgttttcctctaacataacaaaggcacattctgtggctgccaagttggaggctggaatggtgtggatcaattctaatggtgattctgatatccacattccatttggtggttccaaaatgagtggtataggtagggagttggggccatacgcactagacttgtttactgagaaaaaggcagttcatgtcaacttatcgcttccggtcaagtga

SEQ ID NO: 122 - protein, 501 aa, Issatchenkia orientalis
MSALFRTIETPNGKTLEQPLGLFIDNEWVKTNRTFETINPSTGEAICHVYRAGVQEVNDAVEAANRAFRNESWSGLTGSQRGDLLYRMYQVIKRDAESIASIESMDNGKPYAAECLDGDLGEAADVFKYYAGWADKITGELIGSSVLGKNKMCYVEPTPLGAVGGIVPWNFPFTMMAWKIAPALATGCTVVMKSSEVTPLTALWYGKIALEVGLPKGVLNILSGFGSDVGSAMASHPKLAKIAFTGSTATGKKIMEAAGGSNLKKVTLECGGKSPYIVFDDADLELAVEWAYWGIWYNKGEVCTSTSRFLIQEDIYDKFVESFVELTKTRAITADPFDDRCTIGPLVSSSQYEKVKKYVEIGKNEGAKLLTGKFIDGPGYFCEPFIFSECTDDMTIMKEEIFGPVVGITKFSTVKEAIERANATTYGLGAALFSSNITKAHSVAAKLEAGMVWINSNGDSDIHIPFGGSKMSGIGRELGPYALDLFTEKKAVHVNLSLPVK

SEQ ID NO: 123 - DNA, 1506 bp, Issatchenkia orientalis
atggctcttccacttgcaactacaatctccttatcaagcggcaaaacattagaacagccaattggtttatttattgataatgaatttgtcaatccaatttctgtttctaatgcaagaacactaacaaccttcaacccaagcacaggtgagccaataaccgatgttcattgtgcctcagctgcagatgttgatgttgcggtaaatgctgcaaacaaggcaatggaaacatggaaagacattgatcctactgttcgtgtcgaacttttactaaaattggccagcttagttgacgagcattcccaagcaattgctgaaattgaagcactagactcgggtaaaccattgtactcgaatgcactggcggatgttcaatcggttgctgagtacttaaggtactgtgccggttgggcggataaattacacggtacgcaaattccaataaactctaaggtaatggctattacaaaacgtgtacccttagttgtcggctgcatcattccatggaactacccaatttcaatggcctcctggaagttctgtccagcattggctgccggatgtactattgtaatgaagtcaagtgagataaccccgttatcgttactttattttgcgaatttggtcaaattagcaggtttccctaagggtgtttttaatgtcgtctctggatttggtgatgatgttggctcagcgctttcaaatcacccaaagttgggtaagattgcatttacaggctcgaccttgaccgggcaaaaggtgatggcggatgctgccagatcaaatttgaaaagcgtatctttggaatgtggtggtaaatctccacttattgtcttcgaagatgcagaattggatgaatgcgttaaatgggcaagttttggtgtcatgtataacaccggacaaaattgtactgccaattctcgtattattgtgcatgataaggtttatgatcaatttatcgaaaagttcctgtctcaactcaaggaagattggaaaatgggagatgtcatgaatgaaaagactacattgggaccacttgtcagccaacaacaatatgagcgtgttcagtcgtatattgatataggtgtcaaagaaggggctacactgattcaaccgcttaaggagagcactccatcaaatggattctacatctctcctactgtttttactaacgttaaggaagatatgagaattgttaaggaggaaatatttggtcctgtcgtaactatctccaaattctcaactgaggaagaggcaatttcaaaggcgaatgatacaatttatggcttagctgcaatgttatttactactaattttgaacgtgccaacagagttgctgataagctggaagctggcagtgtgtacattaatagctctaacaacgagagtaccaaagttccatttggaggaatgaagatgagtggtattggaagagagttggggcaagaagcatttaatttgtacactgttacaaagagtatttattatagttatggtgctaagctttaa

SEQ ID NO: 124 - protein, 501 aa, Issatchenkia orientalis
MALPLATTISLSSGKTLEQPIGLFIDNEFVNPISVSNARTLTTFNPSTGEPITDVHCASAADVDVAVNAANKAMETWKDIDPTVRVELLLKLASLVDEHSQAIAEIEALDSGKPLYSNALADVQSVAEYLRYCAGWADKLHGTQIPINSKVMAITKRVPLVVGCIIPWNYPISMASWKFCPALAAGCTIVMKSSEITPLSLLYFANLVKLAGFPKGVFNVVSGFGDDVGSALSNHPKLGKIAFTGSTLTGQKVMADAARSNLKSVSLECGGKSPLIVFEDAELDECVKWASFGVMYNTGQNCTANSRIIVHDKVYDQFIEKFLSQLKEDWKMGDVMNEKTTLGPLVSQQQYERVQSYIDIGVKEGATLIQPLKESTPSNGFYISPTVFTNVKEDMRIVKEEIFGPVVTISKFSTEEEAISKANDTIYGLAAMLFTTNFERANRVADKLEAGSVYINSSNNESTKVPFGGMKMSGIGRELGQEAFNLYTVTKSIYYSYGAKL

SEQ ID NO: 125 - DNA, 1544 bp, Issatchenkia orientalis
  misc_feature (1319)..(1319): N= A, C, G, OR T
atgatgggcgcaactacagcaaaaattagtattccaaatggtaacaaatacgagcaacctacaggtttgttcatcaatggtgagtttgttgcttcaagtgatggtaaaactgcagaagttgagaatccaggcaatggaaacattgtatgttctgtccacttagcttctattgaggatattaataccgccgtagaagctgctgaagatgcatttttcaaaaggtgggccaccatcagtggtaaagccaagggagaatacttgagtaagattgccgatctaatcgttaaatattctgatcaattggcagatctagaggctattgaatcaggtaagccaaaggacaccaatgcaatctttgatgttttacattcggctgatgttttcagatactatgctggcaaggctgtcactgcacaaagcggcaagactatcgagtccgaactctccaaatttacatacacagtttacgagccctatggtgtttgtgccgctatcatcgcatggaacttcccaatgagcacatttgcgtggaaagttgcggcatgtttagctgctggtaatacaatggttgtcaaaacttccgagctgactccgttatctgcattgttcatgtgtaagattttccaagaagcagatctacctgctggagttataaacgtcacatgtggtttaggttctgttgcaggtgttcgattgagtgaacatgaaaaggttcagaaaatttcgtttactggctccactggcgttggtaagttgatccaagaatccgcagcaaagtctaacttaaagtattgtacgcttgaatgtggtggtaagtctccgttagtgatttacgaggatgcagatcttgagcaagcagtgaagtgggctgcctttggtatttttttcaacaaaggtgaaatttgcacagcctcttccagaatatatgttcaagaatcagtctatgacaaatttttgactatgtacaaggatcatgtggaagaagcctatgttcaaggagaacagtttgccactggtgttaacgttgggcctactgtctgcaaagcccaacaagagaaaatactggcctacattgaaagtgccaagcaagaaggtggtagaattatcactggtggtaaaataccatcttacacgaacaaaaatggttactatctcgaaccaacaattattgcagattgtaaccaggatatgaaggtagtcagggaagagattttcggaccagtcgttactgtatccaaattcactagtgatgaagaagccatcaaattaagcaatgattccgaatatggcttggcagcatatttattcactystsrasnassrgttyrgytaaaatyrththraaggacctcgttagatctcagaattatatcagaaaagtgcaaagcggacaggtctttgtcaacttcacctttgcggctgatttcaggttgccatttggcggatataagatgagtggtaacggaagagagcttggtgatgaaggactgagtgctttccagcaagtcaaagcagtacacattaatctcactgggaagttgtaa

SEQ ID NO: 126 - protein, 503 aa, Issatchenkia orientalis
MMGATTAKISIPNGNKYEQPTGLFINGEFVASSDGKTAEVENPGNGNIVCSVHLASIEDINTAVEAAEDAFFKRWATISGKAKGEYLSKIADLIVKYSDQLADLEAIESGKPKDTNAIFDVLHSADVFRYYAGKAVTAQSGKTIESELSKFTYTVYEPYGVCAAIIAWNFPMSTFAWKVAACLAAGNTMVVKTSELTPLSALFMCKIFQEADLPAGVINVTCGLGSVAGVRLSEHEKVQKISFTGSTGVGKLIQESAAKSNLKYCTLECGGKSPLVIYEDADLEQAVKWAAFGIFFNKGEICTASSRIYVQESVYDKFLTMYKDHVEEAYVQGEQFATGVNVGPTVCKAQQEKILAYIESAKQEGGRIITGGKIPSYTNKNGYYLEPTIIADCNQDMKVVREEIFGPVVTVSKFTSDEEAIKLSNDSEYGLAAYLFTKDLVRSQNYIRKVQSGQVFVNFTFAADFRLPFGGYKMSGNGRELGDEGLSAFQQVKAVHINLTGKL

SEQ ID NO: 127 - DNA, 1716 bp, Issatchenkia orientalis
  misc_feature (655)..(655): n is a, c, g, or t
atggctccaactgctgttgatatccataacgagtacaaacagaatgtttccaacgaacaggaaattcctttcaacaaaactgaaagaaagtcatcgattgcatctaaattaggactgaatccagacgctaagattcactacaattctgctgttcctatattatacgaagatggtttaaaggaaaaaggtacaaccatttcctcttctggtgcattgattgcattctctggttccaaaacaggtagatctccaaaggacaaaagaattgtcgatgaagagacttcaacagacaacatctggtggggtccagtcaataagaaggttgatgaaaacacttggaatatctcgaaatctagagcgattgattatttgagaacaagagagaaggtttacattatcgatgcttttgctggttgggatccaagatacagaattaaggttagaattgtctgtgctagagcttaccatgctttgttcatgaagaatatgttaattagaccaacaacggaagaattaaagaactttggtgagcctgatttcaccatttggaatgcaggtcaattccctgctaatgtttacactaagggtatgacttcttcaacttctgttgaaataaatttcaagtctthrysgymtthrsrsrthrsrvagtasnhyssratggaaatggttatcctaggtactgaatacgcaggtgaaatgaagaaaggtatctttaccgttatgttctacttgatgccaatcagacacaaggttttaactttacactcttctgcaaatcaaggtaaaaaggatggtgatgtcacattattctttggtttatctggtacaggtaaaacaaccttgtctgcagatcctcatagagaattgattggtgatgatgaacattgctggtctgatcatggtgttttcaacattgaaggtggatgttatgctaagtgtttggacttatctgctgaaagagaacctgagattttcaatgcaattaggtttggatctgtcttggagaatgttgtctatgatccagttgatagaactgttgactattccgctgctaatgtcactgaaaatactagatgtgcttatcctatcgactttattccttctgctaagatcccatgtctggcagattctcatccaaagaatattgttcttttaacttgtgatgcaagaggtgttttgccacctgtctccaagctaactaatgcacaagtcatgtatcactttatctctggttacacctccaagatggcaggtaccgaagttggtgtcactgaaccagaagcaaccttctctgcatgttttggtcaacctttcttagttttacatccaatgaaatacgcacaacaactctctgataaaatggctgaacattcttccaccgcttggttattgaataccggttggactggtcaatcttatgttaaaggtggtaagagatgtccattgaagtatactagagcaattttagatgctattcactctggtgagcttgcaaaacaggaattcgaaacataccctactttcggtttacaagttccaaaaacttgtccaggtgtcccagaaagtgttctgaacccatctaaacactgggctactggtgaagctgatttcaaggctgaagtcactaacttggctaaattatttgctgagaactttgaaaagtattctgcagaatgtactgcagaagttgttgctgctggtcctgctttataa

SEQ ID NO: 128 - protein, 560 aa, Issatchenkia orientalis
MAPTAVDIHNEYKQNVSNEQEIPFNKTERKSSIASKLGLNPDAKIHYNSAVPILYEDGLKEKGTTISSSGALIAFSGSKTGRSPKDKRIVDEETSTDNIWWGPVNKKVDENTWNISKSRAIDYLRTREKVYIIDAFAGWDPRYRIKVRIVCARAYHALFMKNMLIRPTTEELKNFGEPDFTIWNAGQFPANVYTKGMTSSTSVEINFKSMEMVILGTEYAGEMKKGIFTVMFYLMPIRHKVLTLHSSANQGKKDGDVTLFFGLSGTGKTTLSADPHRELIGDDEHCWSDHGVFNIEGGCYAKCLDLSAEREPEIFNAIRFGSVLENVVYDPVDRTVDYSAANVTENTRCAYPIDFIPSAKIPCLADSHPKNIVLLTCDARGVLPPVSKLTNAQVMYHFISGYTSKMAGTEVGVTEPEATFSACFGQPFLVLHPMKYAQQLSDKMAEHSSTAWLLNTGWTGQSYVKGGKRCPLKYTRAILDAIHSGELAKQEFETYPTFGLQVPKTCPGVPESVLNPSKHWATGEADFKAEVTNLAKLFAENFEKYSAECTAEVVAAGPAL

SEQ ID NO: 129 - protein, 267 aa, Saccharomyces cerevisiae
MSQGRKAAERLAKKTVLITGASAGIGKATALEYLEASNGDMKLILAARRLEKLEELKKTIDQEFPNAKVHVAQLDITQAEKIKPFIENLPQEFKDIDILVNNAGKALGSDRVGQIATEDIQDVFDTNVTALINITQAVLPIFQAKNSGDIVNLGSIAGRDAYPTGSIYCASKFAVGAFTDSLRKELINTKIRVILIAPGLVETEFSLVRYRGNEEQAKNVYKDTTPLMADDVADLIVYATSRKQNTVIADTLIFPTNQASPHHIFRG

SEQ ID NO: 130 - DNA, 420 bp, Streptomyces avermitilis
atgttaagaaccatgttcaaatctaagattcacagagcaactgttactcaagcagatctccattatgttggttccgttactattgatgcagacttgttagacgcagcagacttgttgccaggtgaattggttcacatcgttgacattacgaacggtgctagattggaaacttacgtcattgaaggtgaacgtggttccggtgttgttggtatcaatggtgctgccgctcatttagttcatcctggtgatcttgttatcattatctcctatgcacaagtttcagatgcagaagcacgtgcattgcgtccaagagttgttcacgttgacagagacaatagagttgttgcgcttggtgcggatccagccgaaccagtcccaggttccgaccaagctagatccccacaagctgttactgcataa

SEQ ID NO: 131 - DNA, 384 bp, Clostridium acetobutylicum
atgcacttgaacatgttgaagtccaagatccacagagctaccgtcgttcaagcagacttgaactacgtcggttccatcaccatcgacagaaacttgatggacaaggcaaacatcttggaatacgaaaaggtcgagatcgcaaacatcaacaacggtgcaagattcgaaacctacgtcatcgctggtgaggctggttccggtatcatctgtttgaacggtgctgctgcaagatgtgcacaagcgggtgacaaggttatcatcatgtgttactgttccttgaccccagaagaagcttccgagcacagaccaaaggtcgttttcgtcaacgacgacaactccatctccaacgtcaccgaatacgagaagcacggcaccatcggttaa

SEQ ID NO: 132 - DNA, 354 bp, Helicobacter pylori
atgaccttcgagatgttgtactccaagatccacagagcaaccatcaccgacgcaaacttgaactacatcggctccatcaccatcgacgaggacttggctaagttggctaagttgagagagggtatgaaggtcgaaatcgtcgacgtcaacaacggcgagagattctccacctacgtcatcttgggtaagaagagaggtgaaatctgcgtcaacggtgcagcagccagaaaggtcgctatcggtgacgtcgtcatcatcttggcttacgcatccatgaacgaggacgagatcaacgctcacaagccatccatcgtcttggtcgacgaaaagaacgaaatcttggaaaagggttaa

SEQ ID NO: 133 - protein, 117 aa, Helicobacter pylori
MTFEMLYSKIHRATITDANLNYIGSITIDEDLAKLAKLREGMKVEIVDVNNGERFSTYVILGKKRGEICVNGAAARKVAIGDVVIILAYASMNEDEINAHKPSIVLVDEKNEILEKG

SEQ ID NO: 134 - DNA, 387 bp, Bacillus sp. TS25
atgtacagaaccatgatgaagtccaagttgcacagagcgaccgtcaccgaagcaaacttgaactacgtcggttccatcaccatcgaccaagacttgatggaagctgcagacatcttggaaaacgagaaggtccaaatcgtcaacaacaacaacggtgctagattcgaaacctacgtcatcgctggtccaagaggctccggcaccatctgtttgaacggtgcagcagcaagattggtccaaccaggtgacaccgttatcatcatctcctacgcaatgttggaagaagccgaggctagaaagcaccaacctgtcgtcgttttgttgaacccagacaacaccatccaagaattgatcagagaaacccacggtgctaccgctaccgtctaa

SEQ ID NO: 135 - protein, 128 aa, Bacillus sp. TS25
MYRTMMKSKLHRATVTEANLNYVGSITIDQDLMEAADILENEKVQIVNNNNGARFETYVIAGPRGSGTICLNGAAARLVQPGDTVIIISYAMLEEAEARKHQPVVVLLNPDNTIQELIRETHGATATV

SEQ ID NO: 136 - DNA, 411 bp, Corynebacterium glutamicum
atgttgagaaccatcttgggttccaaaatccacagagctaccgttacccaagcagacttggactacgttggttcagtcaccatcgatgcagacttggttcatgccgcaggtttgatcgaaggtgaaaaggttgccatcgtcgacatcaccaatggcgctagattggaaacctacgttatcgttggtgatgctggcaccggtaacatctgtatcaacggtgcagcagcacacttgatcaacccaggtgatttggttatcatcatgtcctacttgcaagctaccgatgcagaggccaaggcttacgaaccaaagatcgttcacgtcgacgcagacaacagaatcgttgctttgggtaacgacttggcagaagctttgcctggttccggtttgttgacctcaagatctatctaa

SEQ ID NO: 137 - protein, 136 aa, Corynebacterium glutamicum
MLRTILGSKIHRATVTQADLDYVGSVTIDADLVHAAGLIEGEKVAIVDITNGARLETYVIVGDAGTGNICINGAAAHLINPGDLVIIMSYLQATDAEAKAYEPKIVHVDADNRIVALGNDLAEALPGSGLLTSRSI

SEQ ID NO: 138 - DNA, 384 bp, Bacillus licheniformis
atgtacagaaccttgatgtccgctaagttgcacagagctagagtcaccgaagcaaacttgaactacgttggttccgtcaccatcgacgaggacttgttggacgcagtcggtatgatggcaaacgaaaaggtccaaatcgtcaacaacaacaacggtgctagattggaaacctacatcatccctggtgagagaggttccggtgtcgtctgtttgaacggtgctgcagctagattggtccaagttggtgacgtcgttatcatcgtttcctacgccatgatgtccgaagaagaagcaaagacccacaagccaaaggtcgctgttttgaacgaaagaaacgaaatcgaagagatgttgggtcaagaaccagctagaaccatcttgtaa

SEQ ID NO: 139 - protein, 127 aa, Bacillus licheniformis
MYRTLMSAKLHRARVTEANLNYVGSVTIDEDLLDAVGMMANEKVQIVNNNNGARLETYIIPGERGSGVVCLNGAAARLVQVGDVVIIVSYAMMSEEEAKTHKPKVAVLNERNEIEEMLGQEPARTIL

SEQ ID NO: 140 - DNA, 1356 bp, Streptomyces avermitilis
atgacaccacagccaaacccacaagtcggtgcagcagtcaaagctgcagatagagcacacgtcttccactcttggtctgcacaagaattgatcgatccattggctgttgctggtgcagagggttcctacttctgggattacgatggtagacgttaccttgacttcacctccggcttagtcttcaccaacatcggttaccaacacccaaaggttgtcgcagctatccaagaacaagccgcatctttgactacatttgccccagctttcgcagttgaagcaagatccgaagctgcaagattgatcgctgagcgtactccaggtgatttagacaaaatcttcttcaccaacggtggcgcagatgctatcgagcacgctgttcgtatggcaagaatccacgctggtagaccaaaggtcttatccgcatacagatcataccacggtggtacacaacaggcagtcaacatcactggtgatccaaggagatgggcatccgattccgcttctgctggcgttgtccacttctgggctccatacttatacagatccagattctacgccgaaactgagcaacaagaatgtgagcgtgctcttgagcacttggaaactactatcgccttcgaaggtccaggtactattgccgctatcgttttggaaactgtcccaggtactgctggtatcatggttcctccaccaggttacttagcaggtgttagagaattgtgtgacaaatacggtatcgtcttcgtcttggatgaagtcatggctggtttcggcagaactggcgaatggttcgctgcagacttattcgatgttaccccagacttgatgaccttcgctaagggtgtcaactcaggttacgttccattgggtggtgttgctatctccggcaaaatcgcagagactttcggtaagagagcttacccaggtggtttgacgtactccggtcaccctcttgcttgcgcagccgctgttgctactatcaacgttatggcagaagaaggtgtcgttgaaaacgctgcaaacttgggtgctagagttatcgaaccaggtttgagagaacttgcagagagacacccatcagttggtgaagttagaggtgttggtatgttctgggctttggaattggttaaggatagagaaaccagagaacctttggtcccatacaatgccgctggtgaagcgaacgcaccaatggctgctttcggtgcagctgcaaaggcaaacggtttgtggccattcatcaacatgaacagaacccacgttgttcctccttgtaacgttaccgaagccgaagctaaagaaggcttggcagcattggatgcagctttatctgttgcagatgagtacactgtctaa

SEQ ID NO: 141 - DNA, 1416 bp, Saccharomyces cerevisiae
atgtccatctgtgagcaatactacccagaagaaccaaccaagccaaccgtcaagaccgaatccatccctggtccagaatcccaaaagcaattgaaggaattgggtgaagttttcgacaccagaccagcttacttcttggcagactacgaaaagtccttgggtaactacatcaccgacgtcgacggtaacacctacttggacttgtacgctcaaatctcctccatcgccttgggttacaacaacccagcattgatcaaagccgctcaatccccagaaatgatcagagcattggttgacagaccagccttgggtaacttcccttccaaggacttggacaagatcttgaagcaaatcttgaagtccgctccaaagggtcaggaccacgtctggtccggtttgtccggtgcagacgcaaacgaattggctttcaaggctgcattcatctactacagagctaagcaaagaggttacgacgcagacttctccgaaaaggaaaacttgtccgttatggacaacgacgcaccaggtgctccacacttggcagttttgtccttcaagagagctttccacggtagattgttcgcatccggttccactacctgttccaagccaatccacaagttggacttccctgctttccactggccacacgccgaatacccatcctaccagtaccctttggacgaaaactccgacgcaaacagaaaggaggacgaccactgcttggcaatcgttgaagaattgatcaagacctggtccatccctgttgctgcgttgatcatcgaaccaatccaatccgagggtggtgacaaccacgcctccaagtacttcttgcaaaagttgagagacatcaccttgaagtacaacgtcgtctacatcatcgacgaagtccaaactggcgttggcgcaaccggtaagttgtggtgtcacgaatacgcagacatccagcctccagtcgacttggtcaccttctccaagaagttccaatccgctggctacttcttccacgaccctaagttcatcccaaacaagccatacagacaattcaacacctggtgtggtgaaccagcaagaatgatcatcgcaggtgcaatcggtcaagagatctccgacaagaagttgaccgaacaatgctccagagtcggtgactacttgttcaagaagttggaaggtttgcaaaagaagtacccagagaacttccaaaacttgagaggtaagggtagaggcaccttcatcgcttgggacttgccaactggcgagaagagagacttgttgttgaagaagttgaagttgaacggctgtaacgttggtggctgtgctgttcacgcagtcagattgagaccttccttgaccttcgaagagaagcacgcagacatcttcatcgaagctttggctaagtccgtcaacgaattgtaa

SEQ ID NO: 142 - DNA, 1428 bp, Saccharomyces kluyveri
atgccatcctactccgttgcagaattgtactacccagacgaacctaccgaacctaagatctccacctcctcctacccaggtccaaaggcaaagcaagaattggaaaagttgtccaacgtcttcgacaccagagcagcttacttgttggcagactactacaagtcccgtggtaactacatcgttgaccaggacggtaacgtcttgttggacgtttacgctcaaatctcctccatcgccttgggttacaacaacccagaaatcttgaaggttgcaaagtccgacgcaatgtccgttgcattggccaaccgtccagcattggcttgtttcccatccaacgactacggtcaattgttggaagacggtttgttgaaggcagcaccacaaggtcaagacaagatctggaccgctttgtccggttccgacgcaaacgaaaccgccttcaaagcctgcttcatgtaccaagctgcgaagaagagaaacggtagatccttctccaccgaagaattggaatccgttatggacaaccaattgccaggcacctccgaaatggttatctgttccttcgaaaagggtttccacggtcgtttgttcggttccttgtccactaccagatccaagcctatccacaagttggacatcccagctttcaactggcctaaagccccattcccagacttgaagtacccattggaagaaaacaaggaagccaacaaggctgaagaatcctcctgtatcgaaaagttctcccaaatcgttcaagagtggcaaggtaagatcgctgcagttatcatcgaaccaatccagtccgagggtggcgacaaccacgcttcctccgacttcttccaaaagttgagagaaatcaccatcgaaaacggtatcttgatgatcgtcgacgaagttcaaaccggtgtcggtgctaccggcaagatgtgggcacacgaacactggaacttgtccaaccctccagacttggttaccttctccaagaagttccaagcagcaggtttctactaccacgacccaaagttgcaaccagaccagccattcagacagttcaacacctggtgtggtgacccatccaaggctttgatcgccaaggttatctacgaagaaatcgttaagcacgacttggtcaccagaactgccgaagtcggtaactacttgttcaacagattggaaaagttgttcgaaggtaagaactacatccagaacttgagaggtaagggtcaaggcacctacatcgctttcgacttcggcacctcctccgagagagactccttcttgtccagattgagatgtaacggtgcaaacgtcgctggttgcggtgactccgctgtcagattgagaccatccttgaccttcgaagagaagcacgcagacgtcttggtttccatcttcgacaagaccttgagacaattgtacggctaa

SEQ ID NO: 143 - DNA, 747 bp, Escherichia coli
atgatcgttttggtcaccggtgcaaccgcaggtttcggcgaatgtatcaccagaagattcatccagcagggtcacaaggttatcgctaccggtagaagacaagagagattgcaagaattgaaggacgagttgggtgacaacttgtacatcgctcaattggacgttagaaacagagcagctatcgaagaaatgttggcatccttgccagctgaatggtgcaacatcgacatcttggtcaacaacgctggtttggcattgggtatggaaccagctcacaaggctagtgttgaggactgggagaccatgatcgacaccaacaacaagggtttggtctacatgaccagagcagttttgcctggtatggttgaaagaaaccacggtcacatcatcaacatcggttccaccgctggttcctggccatacgctggcggtaacgtctacggtgctaccaaggctttcgttagacagttctccttgaacttgagaaccgacttgcacggcaccgctgttagagttaccgacatcgaaccaggtttggttggtggcaccgaattctccaacgtcagattcaagggcgacgacggtaaggctgaaaagacctaccaaaacaccgtcgctttgaccccagaagacgtttcagaggctgtttggtgggtcagtaccttgccagcacacgtcaacatcaacaccttggaaatgatgccagtcacccaatcctacgcaggtttgaacgttcacagacaataa

SEQ ID NO: 144 - DNA, 804 bp, Saccharomyces cerevisiae
atgtcccaaggtagaaaggcagcagaaagattggcaaagaagaccgtcttgatcaccggtgcgtccgctggtatcggtaaggctaccgcgttggagtacttggaagcatccaacggtgacatgaagttgatcttggcagcaagaagattggagaagttggaagaattgaagaagaccatcgaccaagaattcccaaacgctaaggtccacgttgcacaattggacatcacccaagcagagaagatcaagccattcatcgaaaacttgccacaagaattcaaggacatcgacatcttggtcaacaacgctggtaaggcgttgggttccgacagagttggtcaaatcgcaaccgaagacatccaagacgtcttcgacaccaacgtcaccgctttgatcaacatcacccaagctgttttgccaatcttccaagcgaagaactccggtgacatcgtcaacttgggttccatcgctggtagagacgcatacccaaccggctccatctactgcgcctccaagttcgctgtcggtgctttcaccgactccttgagaaaggaattgatcaacaccaagatcagagtcatcttgattgcccctggtttggtcgaaaccgaattctccttggttagatacagaggtaacgaagaacaagcaaagaacgtttacaaggacactaccccattgatggccgacgacgttgcagacttgatcgtttacgctacctccagaaagcaaaacaccgttatcgcagacaccttgatcttcccaaccaaccaagcatccccacaccacatcttcagaggttaa

SEQ ID NO: 145 - DNA, 420 bp, Streptomyces avermitilis
atgcttagaaccatgttcaaatccaagatccacagagcaaccgtcactcaagcagatttgcattacgttggttctgttactattgacgcagacttacttgatgcagccgatttacttcctggtgagcttgttcatattgttgatatcaccaatggtgcgcgtcttgaaacctatgtcattgagggtgaacgtggttccggtgtcgtcggtatcaatggcgcagctgcacacctcgtccatccaggtgacctggtcatcatcatttcttatgcacaggtctccgatgctgaagcccgtgccttaagaccaagagtcgttcacgtcgacagagataacagagttgtcgctttaggtgcagacccagcagagccagttccaggttccgatcaagctagatcaccacaggctgttaccgcctaa

SEQ ID NO: 146 - DNA, 420 bp, Streptomyces avermitilis
atgttaagaactatgtttaagtccaagattcacagagctaccgtcacccaagcagatttgcattacgtcggttccgttaccattgatgcagatttactcgatgcggcagacttgttacctggtgaactagttcacattgttgacattaccaatggtgctagattggaaacttacgtcattgaaggtgaaagaggtagtggtgtcgttggtatcaatggtgcagctgctcacttagttcacccaggtgacttagtcatcatcatttcatatgcacaagtttccgatgcggaagctagagcattaagaccaagagttgttcatgttgatagagacaacagagtcgttgcacttggtgcagatcctgctgaaccagttccaggttcagatcaagctaggtctccacaagcagttactgcataa

SEQ ID NO: 147 - DNA, 420 bp, Streptomyces avermitilis
atgttaagaactatgttcaagagtaagattcatagggctaccgttacccaggcagatctacattatgttggttctgttaccattgacgcagatttgttggatgcagcagacttgttaccaggtgaactcgttcacattgtcgatatcaccaacggtgccagactggaaacttatgtcattgaaggtgagagaggcagtggtgttgtcggcattaacggtgccgcagcacacttggttcatccaggtgacttggtcatcatcatttcttacgcacaagtctccgatgccgaagctagagcattgagacctagagtcgttcacgttgacagagacaatagagttgttgctcttggtgcagatccagctgagccagttccaggttccgatcaagcgagatctcctcaagctgttactgcataa

SEQ ID NO: 148 - DNA, 384 bp, Bacillus licheniformis
atgtatagaaccttgatgagtgcaaagcttcacagagcaagagtcactgaagcaaacttgaactacgttggttctgttactattgacgaagacttacttgatgcagtcggtatgatggcaaacgagaaagttcaaattgtcaacaataacaatggtgcgcgtcttgaaacctatatcattcctggtgaacgtggttccggtgtcgtctgcttgaatggcgcagctgcaaggctcgtccaagttggtgacgtcgtcatcattgtttcttatgcaatgatgtccgaagaagaagccaaaacacataagccaaaggtcgctgtcctcaatgaaagaaacgaaattgaggaaatgttaggtcaggaaccagcgagaaccatcttataa

SEQ ID NO: 149 - DNA, 384 bp, Bacillus licheniformis; identical to SEQ ID NO: 148

SEQ ID NO: 150 - DNA, 384 bp, Bacillus licheniformis
atgtacagaacgttaatgtctgccaagttacacagagcgagagttactgaagcaaatctcaactatgttggttcagttaccattgatgaggatctattggatgctgttggtatgatggcaaatgaaaaggttcaaatcgtcaataacaacaatggtgctagattagaaacttacatcattcctggtgaaagaggttcaggtgttgtttgcttaaacggtgctgccgcaagattagttcaagtcggtgatgttgttatcatcgtctcttatgctatgatgagtgaggaagaagctaagactcataagcctaaggttgccgttctcaatgagagaaacgaaatcgaagaaatgcttggccaagaacctgccagaaccatcctgtaa

SEQ ID NO: 151 - DNA, 384 bp, Bacillus licheniformis
atgtatagaacattgatgtctgcaaagttgcatagggctcgtgttactgaggcaaatctaaactacgtcggttccgtcacaatcgatgaagatctactcgatgccgttggtatgatggccaatgaaaaagttcaaattgtcaacaacaacaacggtgcaagattggagacctatatcattcctggtgaaagaggttcaggtgttgtttgtctgaacggtgctgctgcgaggttggtccaagtcggtgatgttgtcattatcgtttcttatgcaatgatgtcagaagaagaagctaagacccataagccaaaggttgctgttttgaacgaaagaaatgagattgaggaaatgttaggtcaagaaccagcaagaacaatcttataa

SEQ ID NO: 152 - DNA, 945 bp, Metallosphaera sedula
atgaccgaaaaggtctccgtcgtcggtgcaggcgtcatcggtgtcggttgggctaccttgttcgcttccaagggttactccgtctccttgtacaccgaaaagaaggaaaccttggacaagggtatcgaaaagttgcgtaactacgtccaagtcatgaagaacaactcccaaatcaccgaagacgtcaacaccgtcatctccagagtttcccctactaccaacttggacgaagccgttagaggtgcaaacttcgtcatcgaggctgtcatcgaagactacgacgctaagaagaagatcttcggttacttggactccgtcttggacaaggaagttatcttggcatcctccacctccggtttgttgatcaccgaagtccaaaaggctatgtccaagcacccagaaagagctgtcatcgcccacccatggaacccaccacacttgttgcctttggtcgaaatcgttccaggtgagaagacctccatggaagtcgttgagagaaccaagtccttgatggaaaagttggacagaatcgtcgtcgttttgaagaaggaaatcccaggtttcatcggtaacagattggcattcgctttgttcagagaagctgtctacttggttgacgagggtgtcgcaaccgtcgaggacatcgacaaggttatgactgccgctatcggcttgagatgggccttcatgggtccattcttgacctaccacttgggtggtggtgagggtggtttggaatacttcttcaacagaggtttcggttacggtgccaacgaatggatgcacaccttggctaagtacgacaagttcccatacaccggtgtcaccaaggccatccagcaaatgaaggaatactccttcatcaagggtaagaccttccaagagatctccaagtggagagacgaaaagttgttgaaggtctacaagttggtctgggaaaagtaa

SEQ ID NO: 153 - DNA, 1728 bp, Issatchenkia orientalis; identical to SEQ ID NO: 48

SEQ ID NO: 154 - protein, 575 aa, Issatchenkia orientalis; identical to SEQ ID NO: 49

SEQ ID NO: 155 - DNA, 1167 bp, Issatchenkia orientalis; identical to SEQ ID NO: 117

SEQ ID NO: 156 - protein, 388 aa, Issatchenkia orientalis; identical to SEQ ID NO: 118

SEQ ID NO: 157 - DNA, 1683 bp, Aedes aegypti
atgccagccaacggaatgttcgacgtcgctctgcaggtcatcgacgactccaacgtgtctagtggatcggacagtgctggtgtgtctgaagatgaagatgttcaactgttttgcagtaaagggaataccatagtcccgaagccgttgaaaaaatccatatcgaaaatcaaggatgaagagttcagcaaaaccgccaaagcaaacgagaaacgatacgcaagtcttccgagccgtgaacatcaccagcaattcttgaccgacttcctgtcggaagtgctgaacaatgccgttttcaacgctaccgaacgggctaacaaagttctgaactgggtggatccggagcagctcaagcgaaccttggacctggaactgaaggacgagcccgattcacatgagaagctgctggaactgaccagggccaccataaagcactcggtcaaaaccggacatccctacttcatgaaccaactgttctcgtccgtcgatccgtacgggttcgctggacagatccttaccgatgcgttgaaccccagtgtctacacgttcgaagtgtctccggtgttcgtcctgatggaggaagtggtgctcaaagaaatgagaaccatcgttggctacccggacggaaccggagatggcattttctgcccaggtggttcgatggctaacggctattccattagctgtgcccgcttcaaacacatgcccgatgtcaagacaaaaggattacattcacttccgcgcttggtaatcttcacatctgaagacgctcattattcggtgaaaaaattggcatcgttcatgggcatcggctcggacaacgtgtacccaatccatacggacgccatcggcaagatcagagtggatcatctagagtcggaaattctgcgcgccaaatcggagggagccgtgccgtttatggtgtcggccaccgcaggaacaacagtgatcggagcgtttgatccgctggagcagatcgcagatctgtgcaaaaagtacaacctctggatgcacgtggatgccgcctggggtggtggtgcacttatgtccaagaagtaccgatcgctgcttaaaggaatcgaacgatcggactcggtcacctggaacccacacaaattgctcgccgctccgcagcaatgctccaccttcctgacccgccacgagggaatcctatcggagtgccactcgaccaacgcgacctatctcttccagaaggacaaattctacgacacccagtacgacaccggcgataagcacatccagtgtggtcgccgtgccgacgtcctcaaattttggttcatgtggcgtgccaagggcacttccgggctggaacagcacatcgacaaggtgttcgagaatgcggagcacttcaccagcagtattaaatcgcgagaaggttttgaaatggtcgtcgagaatcccgagtgtaccaacgtgtgcttctggtacgtgccacctggattgcggaacgtaccacgtgacagcgcagagttcaccgaacggctgcacaaggttgcccccaaggtcaaggaacgcatgatgcgggaaggttcgatgatgatcacataccaaccgatccacgataagcccaacttcttccgattggtcctgcagaactcggccctggacaaatcggacatgaactacatcatcgatgaaatcgaacgacttgctgcagatttgtaa

SEQ ID NO: 158 - DNA, 1683 bp, Aedes aegypti
atgccagccaacggtatgttcgacgttgcattgcaagttatcgacgactccaacgtctcctccggttccgactccgctggtgtctccgaagacgaagacgtccaattgttctgttctaagggcaacaccatcgtcccaaagccattgaagaagtccatctccaagatcaaggacgaagaattctccaagaccgctaaggcaaacgaaaagagatacgcctccttgccatccagagagcatcaccagcaattcttgaccgacttcttgtccgaagttttgaacaacgcagttttcaacgctaccgaaagagcaaacaaggtcttgaactgggttgacccagaacaattgaagagaaccttggacttggaattgaaggacgaaccagactcccacgaaaagttgttggaattgaccagagcaaccatcaagcactccgttaagaccggtcacccatacttcatgaaccaattgttctcctccgtcgacccatacggtttcgctggtcaaatcttgaccgacgctttgaacccatccgtctacaccttcgaagtttccccagtcttcgttttgatggaagaagtcgttttgaaggaaatgagaaccatcgttggttacccagacggcaccggtgacggtatcttctgtccaggtggttccatggcaaacggttactccatctcctgtgcaagattcaagcacatgccagacgttaagaccaagggtttgcactccttgccaagattggtcatcttcacctccgaagacgcccactactccgtcaagaagttggcttccttcatgggtatcggctccgacaacgtctacccaatccacaccgacgcaatcggcaagatcagagtcgaccacttggaatccgaaatcttgagagccaagtccgaaggtgcggttcctttcatggtctccgctactgctggcactaccgttatcggtgcattcgacccattggaacaaatcgcagacttgtgcaagaagtacaacttgtggatgcacgtcgacgctgcttggggtggtggtgctttgatgtccaagaagtacagatccttgttgaagggtatcgaaagatccgactccgttacctggaacccacacaagttgttagccgcacctcaacaatgttccaccttcttgaccagacacgaaggtatcttgtccgaatgtcactccaccaacgcaacctacttgttccaaaaggacaagttctacgacacccaatacgacaccggtgacaagcacatccaatgtggtagaagggcagacgtcttgaagttctggttcatgtggcgtgccaagggcacctccggtttggaacaacacatcgacaaggttttcgaaaacgctgaacacttcacctcctccatcaagtccagagaaggtttcgaaatggttgttgagaacccagaatgtaccaacgtctgtttctggtacgtcccaccaggtttgagaaacgtccctagagactccgctgaattcaccgaaagattgcacaaggtcgcaccaaaggtcaaggaaagaatgatgagagaaggttccatgatgatcacctaccaacctatccacgacaagccaaacttcttccgtttggttttgcaaaactccgcattggacaagtccgacatgaactacatcatcgacgagatcgagagattggcagcagacttgtaa

SEQ ID NO: 159 - DNA, 1683 bp, Aedes aegypti
atgccagccaacggtatgttcgacgttgctttgcaagttatcgacgactccaacgtttcctccggttccgactccgcaggtgtttccgaagacgaagacgtccaattgttctgctccaagggtaacaccatcgtcccaaagccattgaagaagtccatctccaagatcaaggacgaggaattctccaagaccgctaaggcaaacgaaaagagatacgcgtccttgccttccagagaacatcaccagcaattcttgaccgacttcttgtccgaagtcttgaacaacgcagttttcaacgctaccgaaagagcaaacaaggtcttgaactgggttgacccagagcaattgaagagaaccttggacttggaattgaaggacgaaccagactcccacgaaaagttgttggaattgaccagggcaaccatcaagcactccgtcaagaccggtcacccttacttcatgaaccaattgttctcctccgtcgacccatacggtttcgctggtcaaatcttgaccgacgctttgaacccatccgtttacaccttcgaagtctccccagttttcgtcttgatggaagaggttgtcttgaaggagatgagaaccatcgtcggttacccagacggcaccggtgacggcatcttctgtccaggtggttccatggcaaacggttactccatctcctgtgcaagattcaagcacatgccagacgtcaagaccaagggtttgcactccttgccaagattggtcatcttcacctccgaagacgctcactactccgtcaagaagttggcttccttcatgggtatcggttccgacaacgtctacccaatccacaccgacgcaatcggtaagatcagagttgaccacttggaatccgaaatcttgagagctaagtccgaaggtgcagtccctttcatggtctccgcaaccgcaggcactaccgtcatcggtgcattcgaccctttggagcaaatcgcagacttgtgtaagaagtacaacttgtggatgcacgttgacgctgcttggggtggtggcgcattgatgtccaagaagtacagatccttgttgaagggtatcgagagatccgactccgtcacctggaaccctcacaagttgttagccgctccacagcaatgttccaccttcttgaccagacacgaaggtatcttgtccgaatgtcactccaccaacgcaacctacttgttccaaaaggacaagttctacgacacccaatacgacaccggtgacaagcacatccaatgcggtagaagggcagacgtcttgaagttctggttcatgtggcgtgcaaagggcacctccggtttggagcaacacatcgacaaggtcttcgaaaacgccgaacacttcacctcctccatcaagtcccgtgaaggtttcgagatggtcgtcgaaaacccagagtgcaccaacgtctgtttctggtacgtccctccaggtttgagaaacgtcccacgtgactccgctgaattcaccgagagattgcacaaggttgccccaaaggtcaaggaacgtatgatgagagagggttccatgatgatcacctaccaaccaatccacgacaagccaaacttcttcagattggttttgcagaactccgcattggacaagtccgacatgaactacatcatcgacgagatcgaaagattggctgccgacttgtaa

SEQ ID NO: 160 - DNA, 1683 bp, Aedes aegypti
atgcctgcaaacggtatgttcgacgtcgcattgcaagttatcgacgactccaacgtctcctccggttccgactccgctggtgtctccgaagacgaagacgtccagttgttctgttccaagggtaacaccatcgtccctaagccattgaagaagtccatctccaagatcaaggacgaagaattctccaagaccgcaaaggcaaacgaaaagagatacgcttccttgccatccagagagcatcaccagcaattcttgaccgacttcttgtccgaagttttgaacaacgcagtcttcaacgctaccgagagagccaacaaggtcttgaactgggtcgacccagaacaattgaagagaaccttggacttggaattgaaggacgaaccagactcccacgaaaagttgttggagttgaccagagctaccatcaagcactccgtcaagaccggtcacccttacttcatgaaccaattgttctcctccgtcgacccatacggtttcgcaggccaaatcttgaccgacgctttgaacccttccgtctacaccttcgaagtctccccagttttcgtcttgatggaagaagtcgttttgaaggagatgagaaccatcgttggttacccagacggcaccggtgacggcatcttctgtccaggcggttccatggcaaacggttactccatctcctgtgcacgtttcaagcacatgccagacgtcaagaccaagggtttgcactccttgccaaggttggtcatcttcacctccgaagacgcccactactccgttaagaagttggcatccttcatgggtatcggttccgacaacgtctacccaatccacaccgacgcaatcggtaagatcagggttgaccacttggaatccgaaatcttgagagctaagtccgaaggtgctgtcccattcatggtctccgcaaccgctggcactaccgtcatcggtgccttcgaccctttggaacaaatcgccgacttgtgcaagaagtacaacttgtggatgcacgttgatgctgcgtggggtggtggtgcgttgatgtccaagaagtacagatccttgttgaagggtatcgaacgttccgactccgtcacctggaacccacacaagttgttagcggcaccacaacagtgctccaccttcttgaccagacacgagggtatcttgtccgaatgccactccaccaacgctacctacttgttccagaaggacaagttctacgacacccaatacgacactggcgacaagcacatccagtgtggtagaagagcagacgttttgaagttctggttcatgtggagagctaagggcacctccggtttggaacaacacatcgacaaggtcttcgaaaacgccgaacacttcacctcctccatcaagtccagagaaggtttcgaaatggttgtcgaaaacccagaatgtaccaacgtttgtttctggtacgttccaccaggtttgaggaacgtcccaagagactccgcagagttcaccgaaagattgcacaaggtcgcacctaaggttaaggaaagaatgatgagagagggttccatgatgatcacctaccaacctatccacgacaagccaaacttcttcaggttggtcttgcaaaactccgcgttggacaagtccgacatgaactacatcatcgacgagatcgaaagattggcagcagacttgtaa

SEQ ID NO: 161 - DNA, 1683 bp, Aedes aegypti
atgcctgcaaacggtatgttcgacgtcgctttgcaagtcatcgacgactccaacgtctcctccggttccgactccgcaggcgtctccgaagacgaagacgttcaattgttctgttccaagggtaacaccatcgttccaaagccattgaagaagtccatctccaagatcaaggacgaagaattctccaagaccgctaaggcaaacgagaagagatacgcttccttgccatccagagaacatcaccaacaattcttgaccgacttcttgtccgaagttttgaacaacgctgtcttcaacgctaccgaaagagccaacaaggtcttgaactgggtcgacccagaacaattgaagagaaccttggacttggaattgaaggacgagccagactcccacgagaagttgttggaattgaccagagctaccatcaagcactccgtcaagaccggtcacccatacttcatgaaccagttgttctcctccgtcgacccatacggtttcgctggtcaaatcttgaccgacgcattgaacccttccgtttacaccttcgaagtttcccctgtcttcgtcttgatggaagaagtcgtcttgaaggaaatgagaaccatcgtcggttacccagacggcactggcgacggtatcttctgtcctggtggttccatggccaacggttactccatctcctgtgctagattcaagcacatgccagacgttaagaccaagggtttgcactccttgcctagattggtcatcttcacctccgaagacgctcactactccgttaagaagttggcctccttcatgggtatcggttccgacaacgtctacccaatccacaccgacgcaatcggtaagatcagagtcgaccacttggagtccgaaatcttgagagcaaagtccgaaggcgcagtcccattcatggtctccgcgaccgcaggcactaccgtcatcggtgctttcgacccattggaacagatcgcagacttgtgtaagaagtacaacttgtggatgcacgtcgatgccgcttggggtggtggcgctttgatgtccaagaagtacagatccttgttgaagggcatcgagagatccgactccgttacctggaacccacacaagttgttggctgctccacaacaatgttccaccttcttgaccagacacgagggtatcttgtccgaatgtcactccaccaacgctacctacttgttccaaaaggacaagttctacgacacccaatacgacaccggtgacaagcacatccaatgtggtagaagggcagacgtcttgaagttctggttcatgtggagggcaaagggcacctccggtttggagcaacacatcgacaaggtcttcgaaaacgctgaacacttcacctcctccatcaagtccagagaaggcttcgaaatggtcgttgaaaaccctgaatgtaccaacgtctgcttctggtacgtcccaccaggtttgaggaacgtccctagagactccgctgaattcaccgaacgtttgcacaaggtcgcaccaaaggttaaggaaaggatgatgagagaaggttccatgatgatcacctaccaaccaatccacgacaagccaaacttcttcagattggttttgcaaaactccgcattggacaagtccgacatgaactacatcatcgacgaaatcgaaagattggcagcagacttgtaa

SEQ ID NO: 162 - protein, 560 aa, Aedes aegypti
MPANGMFDVALQVIDDSNVSSGSDSAGVSEDEDVQLFCSKGNTIVPKPLKKSISKIKDEEFSKTAKANEKRYASLPSREHHQQFLTDFLSEVLNNAVFNATERANKVLNWVDPEQLKRTLDLELKDEPDSHEKLLELTRATIKHSVKTGHPYFMNQLFSSVDPYGFAGQILTDALNPSVYTFEVSPVFVLMEEVVLKEMRTIVGYPDGTGDGIFCPGGSMANGYSISCARFKHMPDVKTKGLHSLPRLVIFTSEDAHYSVKKLASFMGIGSDNVYPIHTDAIGKIRVDHLESEILRAKSEGAVPFMVSATAGTTVIGAFDPLEQIADLCKKYNLWMHVDAAWGGGALMSKKYRSLLKGIERSDSVTWNPHKLLAAPQQCSTFLTRHEGILSECHSTNATYLFQKDKFYDTQYDTGDKHIQCGRRADVLKFWFMWRAKGTSGLEQHIDKVFENAEHFTSSIKSREGFEMVVENPECTNVCFWYVPPGLRNVPRDSAEFTERLHKVAPKVKERMMREGSMMITYQPIHDKPNFFRLVLQNSALDKSDMNYIIDEIERLAADL

SEQ ID NO: 163 - protein, 563 aa, Culex quinquefasciatus
MPTNGMFDVALQVIEDANLSSGSDSAGVSEDEDVQLFCTTGNVVSSKPLKKPSLKPVTTVKDEDQNKMKTNAKRYASLPNREQHQRFLTDFLSEVLNNAIFNATDRSNKVLNWVDPEELKRSIDLSLKAEPDSDEKLLELARATIDHSVKTGHPYFMNQLFSSVDVYGFAGQCLTDALNPSVYTFEVSPVFVLMEEVVLKEMRTIVGFPGGVGDGIFCPGGSMANGYAISCARFKHMPDVKTKGLHSLPRLVIFTSEDAHYSIKKLASFMGIGSDNVYPIRTDAVGKIQPDHLEAEILRAKSEGALPFMVSATAGTTVIGAFDPLEQIADLCQKYNLWMHVDAAWGGGALMSKKYRTLLKGVERADSVTWNPHKLLAAPQQCSTFLTRHEGILSGCHSTNATYLFQKDKFYDTQYDTGDKHIQCGRRADVLKFWFMWRAKGTSGFEQHIDKVFENAEYFTNSIKARPGFEMVIENPECTNVCFWYVPPGLRQVPRDSAEFGERLHKVAPKVKERMMREGSMMITYQPIHDKPNFFRLVLQNSGLDKSDMNYIIDEIERLASDL

SEQ ID NO: 164 - protein, 567 aa, Anopheles gambiae
MPANGVCSVGLEVIEDNATYASGSDSAGVSEDEDVQQLFVSGADRVTSVLPKKSDIRKASQVDEQAAAAAAAAVSEKRYASLPNREQHQQFLTQFLTEVLNSAVFNATDRANKVLNWVDPEELQRTLDLALKDEPDTHEKLLELTRATIRHSVKTGHPYFMNQLFSSVDPYGFAGQVLTDALNPSVYTYEVSPVFVLMEEVVLREMRTIVGYPDGEGDGIFAPGGSMANGYAISCARHKFMPDIKTKGLHALPRLVIFTSEDAHYSVKKLASFMGIGSDNVYAIKTDNVGKIRVEHLESEILRAKSEGALPFMVSATAGTTVIGAFDPLEQIADLCAKYNLWMHVDAAWGGGALMSKKYRTLLKGIERSDSVTWNPHKLLAAPQQCSTLLTRHRNILAEAHSTNATYLFQKDKFYDTRYDTGDKHIQCGRRADVLKFWFMWRAKGTAGFEAHIDKVFENAEHFTSSIKARPGFEMVIEQPECTNVCFWYVPPGLRGVPRDSAEYRDRLHKVAPKVKERMMKDGSMMITYQPIHDKPNFFRLVLQNSSLDKSDMNYIIDEIERLGKDL

SEQ ID NO: 165 - protein, 540 aa, Tribolium castaneum
MPATGEDQDLVQDLIEEPATFSDAVLSSDEELFHQKCPKPAPIYSPVSKPVSFESLPNRRLHEEFLRSSVDVLLQEAVFEGTNRKNRVLQWREPEELRRLMDFGVRSAPSTHEELLEVLKKVVTYSVKTGHPYFVNQLFSAVDPYGLVAQWATDALNPSVYTYEVSPVFVLMEEVVLREMRAIVGFEGGKGDGIFCPGGSIANGYAISCARYRFMPDIKKKGLHSLPRLVLFTSEDAHYSIKKLASFQGIGTDNVYLIRTDARGRMDVSHLVEEIERSLREGAAPFMVSATAGTTVIGAFDPIEKIADVCQKYKLWLHVDAAWGGGALVSAKHRHLLKGIERADSVTWNPHKLLTAPQQCSTLLLRHEGVLAEAHSTNAAYLFQKDKFYDTKYDTGDKHIQCGRRADVLKFWFMWKAKGTSGLEKHVDKVFENARFFTDCIKNREGFEMVIAEPEYTNICFWYVPKSLRGRKDEADYKDKLHKVAPRIKERMMKEGSMMVTYQAQKGHPNFFRIVFQNSGLDKADMVHLVEEIERLGSDL

SEQ ID NO: 166 - protein, 600 aa, Attagenus smirnovi
  misc_feature (36)..(36): Xaa can be any naturally occurring amino acid
MVTIWPTSPQGKVIAARPARDPSTSYNGGFAAQYRXFVIQSCKQLNFSSRGITNHARQRRSEKYNLEEDVTDEATSNSDHSPSEDDDLYVRHTNGFNIKPSKPIIEPRKFATFPSVPDKEHHEDFIKACVDILLKEAVFDGTNRKNRVLEWHSPEELKKLFDFNLRKSGSSHEELTRLIKDTIHYSVKTGHPYFVNQLFSSVDLYGLVGQWLTDALNPSVYTYEVSPVFTLMEETVLREMRTIVGFEDGKGDGIFCPGGSMANGYAISCARYKFKPDIKDTGLHGLPRLVLFTSEDAHYSIKKMASLLGIGSNNVYLIKTDELGRMSVPHLVEQIERVHKEGGAPFMVSATAGTTVLGAFDPIQELADVCERYNLWLHVDAAWGGGALISQRHRHLLTGINRADSVTWNPHKLLTAPQQCSTLLLRHEGILAGAHSANAAYLFQKDKFYDTRYDTGDKHVQCGRRADVLKFWFMWKAKGTIGFEQHIDKVFDNAKFFSDNIRHRPGFRMVLEDPECTNICFWYVPPSMRGCEDQQDFNERLHKVAPKIKERMMKEGSMMVTYQPQKSLPNFFRIVFQNSGLERSDMLHLIKEFERLGHDL

SEQ ID NO: 167 - protein, 537 aa, Acyrthosiphon pisum
MPIVMPAATVPTDYATARPVELMVTASTLDETPCGKGPMMESLSAAVCGYKSAPNAADHEAFVRDAVRLMLEQAVFRGTDRRRPVLNWKSPEELQAAFDFALDRSPTTHGHLLNLIEDTIEHSVKTGHPYFINQLFSSVDPYGLIGQWLTDALNPSVYTFEVAPVMTIMEETVLTEMRKFLGYPDGKGDGIFCPGGSIANGYAINCARFSAFPEVKTRGMHGLPRLVVYTSADAHYSIKKLCAFEGIGSDNLYLINTDAKGKMDVSHLRQQIQRTLEEKAVPIMVSATAGTTVLGAFDPIAEIADVCHEYGIWLHVDAAWGGGALVSKKHKHLLTGIDRADSVTWNPHKMLTAPQQCSTFLTKHERVLTESNSSCAQYLFQKDKFYDTTYDTGDKHIQCGRRADVFKFWFMWKAKGTDGLEAHVDENFDNAKYFTEMIRNRAGFKLVLEEPEYTNITFWYIPPSLRGRQNEPDFKNKLHKVAPRIKERMMKEGTMMITYQPSDDLPNFFRLVLQNSSLDQNDMDYFVNEIERLGSDL

SEQ ID NO: 168 - protein, 576 aa, Drosophila sechellia
MLASENFPTHHFKESIFKPYSTTSGDDLASVTPLTATAALVASTPSPADSTSAVAFEQASKMLATAANNNNNNNNNNITSTKDDLSSFVASHPAAEFEGFIRACVDEIIKLAVFQGTNRSSKVVEWHEPAELRQLFDFQLREQGESQDKLRELLRETIRFSVKTGHPYFINQLYSGVDPYALVGQWLTDALNPSVYTYEVAPLFTLMEEQVLAEMRRIVGFPNGGQGDGIFCPGGSIANGYAISCARYRHSPESKKNGLFNAKPLIIFTSEDAHYSVEKLAMFMGFGSEHVRKIATNEVGKMRLSDLEEQVKQCLENGWQPLMVSATAGTTVLGAFDDLAGISELCKKYNMWMHVDAAWGGGALMSKKYRHLLNGIERADSVTWNPHKLLAASQQCSTFLTRHQQVLAQCHSTNATYLFQKDKFYDTSFDTGDKHIQCGRRADVFKFWFMWKAKGTQGLEAHVEKVFRMAEFFTAKVRERPGFELVLESPECTNISFWYVPPGLREMERNREFYDRLHKVAPKVKEGMIKKGSMMITYQPLRQLPNFFRLVLQNSCLEESDMVYFLDEIESLAQNL

SEQ ID NO: 169 - protein, 575 aa, Drosophila melanogaster
MLASENFPTHHFKESIFKPYSTTSGDDLASVSPLTATAALVASTSSPADSTSTVAFEQASKMLANAANNNNNNNNNITSTKDDLSSFVASHPAAEFEGFIRACVDEIIKLAVFQGTNRSSKVVEWHEPAELRQLFDFQLREQGESQDKLRELLRETIRFSVKTGHPYFINQLYSGVDPYALVGQWLTDALNPSVYTYEVAPLFTLMEEQVLAEMRRIVGFPNGGQGDGIFCPGGSIANGYAISCARYRHSPESKKNGLFNAKPLIIFTSEDAHYSVEKLAMFMGFGSDHVRKIATNEVGKMRLSDLEKQVKLCLENGWQPLMVSATAGTTVLGAFDDLAGISEVCKKYNMWMHVDAAWGGGALMSKKYRHLLNGIERADSVTWNPHKLLAASQQCSTFLTRHQQVLAQCHSTNATYLFQKDKFYDTSFDTGDKHIQCGRRADVFKFWFMWKAKGTQGLEAHVEKVFRMAEFFTAKVRERPGFELVLESPECTNISFWYVPPGLREMERNREFYDRLHKVAPKVKEGMIKKGSMMITYQPLRQLPNFFRLVLQNSCLEESDMVYFLDEIESLAQNL

SEQ ID NO: 170 - protein, 508 aa, Danaus plexippus
MRVDSKIIVKKETQDENLYQSLAERSKHEEFLRKAVDLLVERVVFGRSTRSSKVVEWAAPDEIKKAIDLKPRLGPASHDELLAFMANVARYSVNTGHPYFVNQLFSSVDPYGLVGQWLTDALNPSVYTFEVAPVFTLMEEEVLREMRKIVGWPEGEGDGIFCPGGSIANGYAISCARHHFYPEVKYKGVHAVPKLVLFTSELAHYSTKKMAAFMGIGSDNCVNIKTDDVGKMNIVDLEMKIKIAIDNKCTPFMVTATSGTTVFGAFDPLVAISDLCKKYNLWLHVDAAWGGGALMSKKHRHLLNGIELADSVTWNPHKLLAAPQQCSTFLTRHKKVLSEGHSSNAKYLFQKDKFYDTSYDTGDKHIQCGRRADVLKFWFMWKAKGTEGFEKHVDKLFDNAKYFLDHIKQREGFQLVIAEPQCTNIMFWYIPKCLRGCENDADYYERLHKVAPKIKERMIKEGSMMVTYQPQGDLVNFFRIVFQNSALDHKDMVYFANEFERLGSDMIV

SEQ ID NO: 171 - protein, 570 aa, Drosophila yakuba
MLASENFPTHHFKESIFKPYSTSGDDLASATPLTAAAALVATTSSPADSSSAVAFETASKMLATNNNNNNNITSSKDDLSSFVASHPAAEFEGFIRACVDEIIKLAVFQGTNRSSKVVEWHEPAELRQLFDFQLREKGESQDKLRELLRETIRFSVKTGHPYFINQLYSGVDPYALVGQWLTDALNPSVYTYEVAPLFTLMEEQVLAEMRRIVGFPNGGQGDGIFCPGGSIANGYAISCARYRHSPESKKNGLFNAKPLIIFTSEDAHYSVEKLAMFMGFGSEHVRKIATNEVGKMRLSDLEEQVKQCLENNWQPLMVSATAGTTVLGAFDDLAGISELCKKYNMWMHVDAAWGGGALMSKKYRHLLSGIERADSVTWNPHKLLAASQQCSTFLTRHQQVLAQCHSTNATYLFQKDKFYDTSFDTGDKHIQCGRRADVFKFWFMWKAKGTQGLEAHVEKVFRMAEFFTAKVRERPGFELVLESPECTNISFWYVPPGLREMERNREFYDRLHKVAPKVKEGMIKKGSMMITYQPLRQLPNFFRLVLQNSCLEESDMVYFLDEIESLAQNL

SEQ ID NO: 172 - protein, 572 aa, Drosophila erecta
MLASENFPTHHFKESIFKPYSTSGDDLASVTPLTAAAALVASTSSPADSSSAVAFETASKMLTTTNSNNNNNNTTSAKDDLSSFVASHPAAEFEGFIRACVDEIIKLAVFQGTNRSSKVVEWHEPAELRQLFDFQLREKGESQDKLRELLRETIRFSVKTGHPYFINQLYSGVDPYALVGQWLTDALNPSVYTYEVAPLFTLMEEQVLAEMRRIVGFPNGGQGDGIFCPGGSIANGYAISCARYRHSPESKKNGLFNAKPLIIFTSEDAHYSVEKLAMFMGFGSEHVRKIATNEVGKMRLSDLEEQVKQCLENDWQPLMVSATAGTTVLGAFDDLAGISDVCKKYNMWMHVDAAWGGGALMSKKYRHLLSGIERADSVTWNPHKLLAASQQCSTFLTRHQQVLAQCHSTNATYLFQKDKFYDTSFDTGDKHIQCGRRADVFKFWFMWKAKGTQGLEAHVEKVFRMAEFFTAKVRERPGFELVLESPECTNISFWYVPPGLREMERNREFYDRLHKVAPKVKEGMIKKGSMMITYQPLRQLPNFFRLVLQNSCLEESDMVYFLDEIESLAQNL

SEQ ID NO: 173 - protein, 508 aa, Papilio xuthus
MPADSNLIVAGEAIKESLFQSLPERSKHEEFIRRAVDLLVERVVFGRSQRSAKVVEWAAPDEIKSVIDLKPREGPVSHDELLAIMADVARYSVNTGHPYFVNQLFSTVDPYGLIGQWLTDALNPSVYTYEVAPVFTLMEEEVLREMRAIVGWKDGDGDGIFCPGGSISNGYAISCARHHFYPDVKSKGVYAVPKLVLFTSELAHYSTKKMACFMGIGSDNCIMIKTDELGKMDVGDLEIKISEAINSGSTPFMVTATAGTTVFGAFDPLIPISDLCKKYNLWLHVDAAWGGGALMSKKHRHLLKGIELADSVTWNPHKLLAAPQQCSTFLVRHKNVLKEGHSSNAKYLFQKDKFYDTSYDTGDKHIQCGRRADVLKFWFMWKAKGSDGFEKHIDKLFDNAKYFLDHIKQRAGFKLVLENPECTNIMFWYVPNCLRGCENDPNYRERLHKVAPKIKERMIKEGSMMVTYQPQGNLVNFFRIVFQNSALDHKDMVYFANEFERLGSDIIV

SEQ ID NO: 174 - protein, 589 aa, Drosophila persimilis
MLASETFPAHRFKESIFKPYSTSGSASVDDLASVNKTLTSAATTSSSPDTHAAVDIAPTASSVEFETARKMLTNNSSSSSNNSNNNNNNNNNDAKDDISGFVASHPAAPFEGFIRACVDEIIKLAVFQGTNRSTKVVEWHEPAELRQLFDFQLRDKGEPQEKLRELLRETIRFSVKTGHPYFINQLYSGVDPYALVGQWLTDALNPSVYTYEVAPLFTLMEEQVLAEMRRIVGFPNGGKGDGIFCPGGSIANGYAISCARYTYAPESKKNGLFNAKPLIIFTSEDAHYSVEKLAMFMGFGSEHVVKIATNEVGKMRLSDLEDQVRRCLDNGWQPLMVSATAGTTVLGAFDDLTGIGDLCRKYNMWMHVDAAWGGGALMSKKYRHLLNGIERADSVTWNPHKLLAASQQCSTFLTRHQLVLGQCHSTNAAYLFQKDKFYDTSYDTGDKHIQCGRRADVFKFWFMWKAKGNLGLESHVEKVFRMAEFFTAKVRERPGFELVLESPECTNISFWYVPPSLRTMERDREFYDKLHKVAPKVKERMIKKGSMMITYQPLRQLPNFFRLVLQNSCLEESDMIYFLDEIESLAKNL

SEQ ID NO: 175 - protein, 511 aa, Bombyx mori
MPADSDLIVAEREDLGIDRTLYKSLSERSKHEDFIRRAVDLLVERVVFGRSLRTSKVVEWAVPSEIKKAIDLKPRDGPISHDELLGLMADVARYSVNTAHPYFVNQLYSSVDPYGLVGQWLTDALNPSVYTYEVAPVFTLMEEEVLKEMRVLVGWKDGEGDGIFCPGGSIANGYAISCARFHFYPEIKTKGVYAVPKLTLYTSELAHYSTKKLAAFMGIGDENCVLIKTDKYGKIDVEDLEAKIVEGIEEGAAPFLVTATAGTTVFGAFDPLVPIAALCKKYNLWLHVDAAWGGGALMSKKHRHLLNGIELADSVTWNPHKLLAAPQQCSTFLIRHKNVLKEGHSCNAKYLFQKDKFYDTSYDTGDKHIQCGRRADVLKFWFMWKAKGSDGFENHIDTLFDNARFFLEQIRNREGFELVIEKPECTNIMFWYVPRCLRGCENESDYRERLHKVAPKIKELMIKEGSMMVTYQPQGDLVNFFRIVFQNSALDHKDMIYFVNEFERLGRDILV

SEQ ID NO: 176 - protein, 578 aa, Drosophila ananassae
MLASKNYPTHHFKESIFKPYSTSGDDLASVNTLTASAASAAMVATTSSSADTVAVDFENARRMLATNGGIASNGNNNNNVLDSKDSLSGFVASHPAAQFDGFIRACVDEIIKLAVFQGTNRSSKVVEWHEPAELRQLFDFQLREKGESQDKLRELLRETIRFSVKTGHPYFINQLYSGVDPYALVGQWLTDALNPSVYTYEVAPLFTLMEEQVLAEMRRIVGFPNGGQGDGIFCPGGSIANGYAISCARYKYTPESKKNGLFNAKPLIIFTSEDAHYSVEKLAMFMGFGSEHVRKIATNEVGKMRVEDLENQIKMCLENNCQPLMVSATAGTTVLGAFDDLVGISELCKKYNMWMHVDAAWGGGALMSKKYRHLLNGIERADSVTWNPHKLLAASQQCSTFLTPHQQILAQCHSTNATYLFQKDKFYDTSFDTGDKHIQCGRRADVFKFWFMWKAKGSQGLEAHVEKVFRMAEFFTAKVRERPGFELVLDQPECTNISFWYVPPSLRQMERNREFYDRLHKVAPKVKEGMIKKGSMMITYQPLRQLPNFFRLVLQNSCLEESDMLYFLNEIESLAQNL

SEQ ID NO: 177 - protein, 580 aa, Drosophila mojavensis
MLASENFQAHLYNRSSIYKPYNEELASMAKQLTTATADAAGIDAAQAAVDYGSPSKQMLGSNNGSSSGSSNKTSSANSNNNNNNVANGLSSFVASHPSAEFEGFIRACVDEIIQLAVLQGTNRSSKVVEWHEPAELRKLFDFELRDQPDSPDKLRQLLRETIRFSVKTGHPYFINQLYSGVDPYALIGQWLTDALNPSVYTYEVAPVFTLMEEQVLGEMRRIVGFPNNGQGDGIFCPGGSIANGYAISCARYQYAPESKKNGLFNAKPLVIFTSEDAHYSVEKLAMFMGFGSEHVRKIATNELGKMRLSDLEQQIQFCLDNNWQPLMVSATAGTTVLGAFDDLLGISELCRKHNMWMHVDAAWGGGALMSKKYRQLLNGIERADSVTWNPHKLLSASQQCSTFLTRHTQILGQCHSTNAAYLFQKDKFYDTSFDTGDKHIQCGRRADVFKFWFMWKAKGTKGFEAHVEQVFEMSEYFTNKLRERPGFELVLDKPECTNITFWYVPPSLRQMERNQEFYDKLHKVAPKIKEAMIKKGSMMITYQPLRKLPNFFRLVLQNSCLDESDMLYFLNEIETLGQKL

SEQ ID NO: 178 - protein, 588 aa, Drosophila grimshawi
MLASKTFPTHHFKKSIYTTYNGASAPTNVEDLANVAKTLTTTTSSSSDSTVVEANTSPVEFSTPSKMLSSTSTTTTTTTNNNNNNNSNNNNNIVNGLSSFVASHPAAEFEGFIRACVDEIIHLAVFQGTDRASKVVEWHEPAELRKLFDFELREKGESQEKLRQLMRETIRYSVKTGHPYFINQLYSGVDPYALVGQWLTDALNPSVYTYEVAPVFTLMEEQVLAEMRRIVGFPDNGHGDGIFCPGGSIANGYAISCARYNYAPESKKNGLFNAKPLIIFTSEDAHYSVEKLAMFMGFGSENVRKIATNEVGKMRLSDLEEQIQLCLDNNWQPLMVSATAGTTVLGAFDDLVGISELCRKHNMWMHVDAAWGGGALMSKKYRHLLNGIERADSVTWNPHKLLSASQQCSTFLTRHAQILGQCHSTNAAYLFQKDKFYDTSFDTGDKHIQCGRRADVFKFWFMWKAKGSKGFEAHVEQVFEMSEFFTAKLRERPGFELVLDHPECTNITFWYVPPSLRHMEHNQEFYDKLHKVAPKIKEAMIKKGSMMITYQPLRKLPNFFRLVLQNSCLEESDMLYFINEIESLGQNL

SEQ ID NO: 179 - protein, 461 aa, Biston betularia
SQRSAKVVEWAAPEEIKKAIDLKPRDGPASHDQLLGLMADVARYSVNTGHPYFVNQLFSSVDPYGLIGQWLTDALNPSVYTFEVAPVFTLMEEEVLKEMRSLVGWKNGDGDGIFCPGGSIANGYAISCARFYYYPDIKTKGVYAVPRLVLFTSELAHYSTKKMAAFMGIGSDNCILVKADKLGKMDAEDLEVKINEALDDGATPFLVTATAGTTVYGAFDPLAQISSLCKKYNLWLHVDAAWGGGALMSKKHRHLLTGIELADSVTWNPHKLLAAPQQCSTFLIKHKNVLKDGHSSNAKYLFQKDKFYDTSYDTGDKHIQCGRRADVLKFWFMWKAKGSEGFEQHIDTLFDNAKHFVYLIRNREGYRLVIEEPECTNIMFWYIPKCLRGCENEPDYKERLNKVAPKIKERMIKEGSMMVTYQPQGDLANFFRIVFQNSALDHKDMVYFANEFERLGRDIVV

SEQ ID NO: 180 - protein, 583 aa, Drosophila willistoni
MLASENFPTHHFKESIFKPYNATTSAANAAAAATVEDLANVAKTLTSKSTTSSSVASDAAATVSLMGAVDIETARKMLANNNVNINNNNNNNINNNNSKDTAEFESFLRGCIDEIIKLAVVEGTNRSSKVVEWHEPSELRQIFDFQLREKGESQDKLRELLRETIRFSVKTGHPYFINQLYSGVDPYALVGQWLTDSLNPSVYTYEVAPVFTLMEEEVLAEMRRIVGFPDNGLGDGIFCPGGSIANGYAISCARYKYAPESKKNGLFSGKPLIIFTSEDAHYSVEKLAMFMGFGSEHVRKIATNEVGKMRLSDLEQQIQLCLDNNWQPLMVSATAGTTVLGAFDDLVGISELCRKHNMWMHVDAAWGGGALMSKKYRHLLNGIERADSVTWNPHKLLAASQQCSTFLTRHQQILGQCHSTNATYLFQKDKFYDTSYDTGDKHIQCGRRADVFKFWFMWKAKGSEGLRAHVEQVFRMSEYFTQQVRERPGFELVLESPECTNISFWYIPPSLRHMERNQEFYDKLHKVAPKIKEGMIKKGSMMITYQPLRRLPNFFRLVLQNSCLEESDMLYFLNEIESLGHQL

SEQ ID NO: 181 - protein, 548 aa, Apis mellifera
MPANEETLSMTSDQIRNNLLGKACDDSMQNNFDCESSGDDEEDYQNDCSRSIVKENFKEVCNYKSLPVREIHKKFMKSFVNLLLEEAVFEGTLRRNKVVEWIEPTTLHSIIDLKLSDQGCSYETLLTLAHNVIKYSVKTGHPRFINQLYSSVDPYGLLGQWLTDALNPSVYTYEVSPVFSLMEEEILREMRKIVGWKDGRSEGIFCPGGSIANGYAINLARYYKFPQSKELGLFNTGRLIIFTSRDAHYSVKKLSAFLGIGTENVYEVKTDDKGKMCITDLKIQIKKALEEDAIPLMVSATAGTTVLGAFDPLKNIAAICKNYNLWFHVDAAWGGGALMSKKYKYLLDGIELADSVTWNPHKLLAAPQQCSTLLLRHEGLLQDAHGSKASYLFQPDKFYDTSFDSGDKHIQCGRRADVLKFWFMWKAKGTRGLEKHVDRVFKLARYFTNYIKHREGFKLILEPECTNVCFWYVPPSKRQLQNEELLKALQKIGPAVKERMMKKGSMLITYQPLRELPNFFRLVLQNSGLTETDMRFFAEEIERLAIDL

SEQ ID NO: 182 - protein, 586 aa, Drosophila virilis
MLASETFPTHHFKNSIYKPYNGASSAPDVEDLASMAKTLTTTTLSSSDAAVIDVVKTTVEYGNPNKMLNSSVSSSSNSNNKNNNIKNTNGNVNGLASFVASHPAAEFEGFIRACVDEIIKLAVFQGTNRSSKVVEWHEPAELRKLFDFELREKGESPDKLRQLLRETIRFSVKTGHPYFINQLYSGVDPYALVGQWLTDALNPSVYTYEVAPVFTLMEEQVLAEMRRIVGFPNNGHGDGIFCPGGSIANGYAISCARYKYAPESKKNGLFNAKPLIIFTSEDAHYSVEKLAMFMGFGSEHVRKIATNELGKMRLSDLEDQIQLCLDNNWQPLMVSATAGTTVLGAFDDLVGISELCRKHNMWMHVDAAWGGGALMSKKYRQLLNGIERADSVTWNPHKLLSASQQCSTFLTPHAQILGQCHSTNAAYLFQKDKFYDTSFDTGDKHIQCGRRADVFKFWFMWKAKGSKGFEAHVEQVFEMSEYFTAKLRERPGFELVLEKPECTNITFWYVPPSLRQMERNQEFFDKLHKVAPKIKEAMIKKGSMMITYQPLRKLPNFFRLVLQNSCLEESDMLYFLNEIEDLGQNL

SEQ ID NO: 183 - protein, 547 aa, Nasonia vitripennis
MPAHEETQLQEGSAIEALERPRSADSEKHSRLDYEREEEAHQIGEDSDEGYAMDNFNEEGFFCSLPGRESHEKFIRDAVEMILREAVFKGTSRKNRVVEWIEPATLPSKIDLPPRKTGESHEALLRLLDSVIRYSVKTGHPHFVNQLYSSVDPYGLVGQWLTDALNPSVYTYEVSPVFSLMEEAVLKEMRAIVGWQNGEGDGIFCPGGSMANGYAINLARHWMFPIVKEQGLTAVPRLVVFTSEDAHYSVKKLAAFLGIGIANVYSVKVDESGKMCVSDLRAQIDRAIQEGARPLMVSATAGTTVLGAFDPLRSIAELCREHNMWFHVDAAWGGGALVSPKHRHLLDGVELADSVTWNPHKLLAAPQQCSTLLTRHKGLLQSAHGCKATYLFQQDKFYDTSYDFGDKHVQCGRRADVLKFWLMWKAKGTDGLEKHVDRVFQLSRYFVGIIRNRPGWQLLFEPECTNVCFRYVPPSKRHLNGQDLFQALHKVAPLVKERMVKTGSMLITYQPIREQANFFRLVLQNSGLTEADMHFFVEEIERLSEDL

SEQ ID NO: 184 - protein, 508 aa, Bicyclus anynana
MPADSNIIVAVEEKKEDGLFQSLTERSKHEDFIRRAVDLLVERVVFGRASRTSKVVEWSAPEDIKQAIDLKVRDGPASHEELLAFMADVARYSVNTAHPYFVNQLFSSVDPYGLIGQWLTDALNPSVYTFEVAPVFTLMEEEVLREMRSIVGWADGEGDGIFCPGGSIANGYAISCARSYFYPEIKNKGVYAVPKLVIFTSELAHYSTKKMAVFMGIGSDNCILVKADENGRMDVNDFERKINEAIEAGATPFLVTSTSGTTVYGAFDPIVPISNICKKYNLWLHVDAAWGGGALMSRKHRNLLNGIEADSVTWNPHKLLAAPQQCSTFLLKHKNVLKEAHSSNAQYLFQKDKFYDTSYDTGDKHIQCGRRADVLKFWFMWKAKGSEGFEKHVEKLFDNANYFLEHIRQREGFRLVIPKPECTNIMFWYIPKCLRSCENEPNYYERLHKVAPKIKERMIKEGSMMVTYQPQGNLVNFFRIVFQNSALDHKDMIYFANEFERLGSDIVV

SEQ ID NO: 185 - protein, 543 aa, Harpegnathos saltator
MPANEDTSNESLERIEPGRISPSLSQRKMSGGLQNLASSLLPGATVDDDLESSRVEERNFRSIPRRDIHEKLFRDFFELVLQQAVFQSTSGKERVVEWMNPSDLRSVVDFSLPAEGVSHEELLALTRNVIKYSVKTGHPHFVNQLFSSLDPYGLLGQWLTDALNPSVYTYEVSPVFSLMEEDVLREMRRIIGWKGGEGLFCPGGSMANGYAINLARHHRYPNMKQTGLSQMPRLVIFTSEDAHYSVKKLAAFLGIGYDNVYSVKVDSRGKMLVSDLEAQIARATREGAVPLMVSSTAGTTVLGAFDPLKDIAEVCRKHRLWFHVDAAWGGGALVSRTYRRLLDGVELADSITWNPHKLLAAPQQCSTLLLRHEGLLQSAHGCGASYLFQNDKFYDSSYDCGDRHVQCGRRADVVKFWYMWKAKGTRGLEEHVDHVFALSRYFADLVRTRDGWHLLAEPECTNVCFRYIPPSMRDLAGRQLDQAIHKVAPMIKERMVRAGTMLMTYQPLRGTPNFFRLVLQNSGLSEIDMQFFVEEIERLAADL

SEQ ID NO: 186 - protein, 548 aa, Acromyrmex echinatior
MPANEDTSNDETSLRMKHERAGPSMESSWRKMSEEHPRANPSPIPNLPGLVNGIEERQGIEKWDFRSMPRRDAHEKLFRDFFELVLQRAVFQPTSGKDRVVEWVDPYDLRSVVDLSLPAEGVSHEKLLTLTRDIIKYSVKTSHPHFVNQLFSSLDPYGLLGQWLTDALNPSVYTYEVSPVFSLMEEDVLREMRAIISWQEGEGLFCPGGSMANGYAINLARHHRYPNLKQSGLSQMPRLVVFTSEDAHYSVKKLAAFLGIGYDNVYLVKVDSRGKMMVSDLEAQIARAVEEGAAPLMVSATAGTTVIGAFDPLREIAEVCRKHELWFHVDAAWGGGALISETYRGLLDGIQFADSVTWNPHKLLAAPQQCSTLLLRHEGLLQAAHGCGASYLFQNDKFYDASFDCGDRHVQCGRRADVVKFWYMWKAKGTRGLEAHVDRLFALSRHFTDLIRTRDGWHLLVEPECINVCFRYIPPSKRHLTGQELEQALHKIAPIIKERMVRAGTMLITYQTLRNMPNFFRLVLQNSGLTEADMKFFVEEIERLAMDL

SEQ ID NO: 187 - protein, 544 aa, Camponotus floridanus
MPANEDTSANDFAFKRIKPERANPAESQPKMSRKDDSSTNLILSNFTASVEERKEAEKGDFRSIPCRSVHEKLFRDFFELMLQRAVFQSTSGEERVVEWIDPNNLRSVVDLSLPTEGVSHEELLTLTRDIIKYSVKTGHPHFVNQLFSSLDPYGLLGQWLTDALNPSVYTYEVSPVFSLMEEDVLREMRAIIGWQGGEGLFCPGGSMANGYAINLARHHRYPNLKQSGLSQMPRLVVFTSEDAHYSVKKLAAFLGIGYDNVYLIKVDSRGKMVVTDLEAQIVRAINEGAVPLMVSATAGTTVMGTFDPLKKIAEVCRKHGLWFHVDAAWGGGALVSRTYRGLLDGIQLADSITWNPHKLLAAPQQCSTLLLRHEGLLQEAHGCGASYLFQNDKFYDATFDYGDRHVQCGRRADVVKFWYMWKAKGTRGLEAHVDCVFALSRYFADLIRTRDGWRLLAEPECTNVCFRYIPLSKRHLTGRELDQALHKIAPMIKERMMRAGTMLITYQTLRDMPNFFRLVLQNSGLTEADMKFFVEEIERLAVDL

SEQ ID NO: 188 - protein, 532 aa, Pediculus humanus
MFPVISTQKQSFGIINLSLLEDNNFLIKTNSVVDKSDKEDEKLNQKHWSLPLEKYHYDFIVKCVGIIMKEAVFDGTNRNSKVVQWQDPEKLKKSFDFSLNKYSETEGKLLHLISTIIKFSVKTGHPYFVNQLFSGVDPYGLIGQWLTDALNPSVYTYEVSPVFSIMEEVVLEEMRKFIGFPNGKGDGTFCPGGSISNGFGISCARYHLFPQVKKLGIYGIGLRLVLFTSRDAHYSIVKLATFMGLGSDNVISIKTDESGKMKPEELEKAILKVLQEGGTPFMVSATSGTTVLGAFDPLDSIADICEKYKLWFHVDAAWGGGCLMSSIHKKKLQGIHRTDSVTWNPHKLLGVPQQCSAFLTKHKNLLKNVHCAKATYLFQKDKFYDVKYDTGDKHIQCGRRADVLKFWFMWKAKGSSGFEKHINKIFETALYFKKSIENKPDFQLVLSEPECTNICFWYIPPRLQNSKYNNDDLNKVAPRMKEKMMKDGSMMITYQPLRHLPNFFRLVIVNSGLDTHDMDRLITIIQNAGASI

SEQ ID NO: 189 - protein, 549 aa, Atta cephalotes
MPANEDTSNDETSLRMKHERADSSAESSWRKMSEERPRANSSSLTLNLPGLVNGTEERQRAEKRDFRSMPRRDAHEKLFRDFFELVLQRAVFQSTSGKDRVVEWVDPYDLRSVVDLSLPAEGVSHEELLTLTRDIIKYSVKTGHPHFVNQLFSSLDPYGLLGQWLTDALNPSVYTYEVSPVFSLMEEDVLREMRAIIGWQGGEGLFCPGGSMANGYAINLARHHRYPNLKQSGLSQMPRLVVFTSEDAHYSVKKLAAFLGIGYDNVYLVKVDSRGKMMVSDLETQIAQAVKEGAAPLMVSATAGTTVIGAFDPLREIAEVCKKHGLWFHVDAAWGGGALVSGTYRDLLDGIQFADSVTWNPHKLLAAPQQCSTLLLRHEGLLQAAHGCGASYLFQNDKFYDASFDCGDRHVQCGRRADVIKFWYMWKAKGMRGFEAHVDHLFALSRHFTDLIRIRDGWHLLVEPECINVCFRYIPPSKRHLAGQELEQALHKIAPIIKERMVRAGTMLITYQTLRNMPNFFRLVLQNSGLTEVDMKFFVEEIERLAMDL

SEQ ID NO: 190 - protein, 497 aa, Daphnia pulex
MENPALIGWFQTEPSQEQHEQFMRKVMDIVLKEAVFEGTSRNNLVIEWMEPESLLTLLGKELPKNPQSDETLVELIKNVVRYSVKTGHPHFINQLFSSLDPYGLVAQWVTDSLNPSVYTYEVAPVFTLLEHQILREMRRWVGFPDGSGDGVFCPGGSMANIYGIQCARHRAMPSLKETGTFGSPRLVVLTSKDAHYSVKKACFLLGIGVSNLYLVDVDTSGRMDLVHLRQEVQRALNENARPFMVSATAGTTVLGATDPLDGIADICQEFGMWMHVDAAWGGGALMSTKHRHILKGIERADSVTWNPHKLLGVPQQCSTFLTRHADLLLEANSASASYLFQKDKFYDPKWDVGDKYLQCGRRADVLKFWLMWQAKGSLGLEKHVDTLFENVAYFTSFIRNRKGFQLVLEEPPFVNVCFWYIPPSLQGAQHDEDYEEKLHKIAPKIKERMIKKGSMMITYQPLRNLPNFFRLVLQSSAVTIDDMEFFAEEIERLGCDL

SEQ ID NO: 191 - protein, 581 aa, Lottia gigantea
METKRFDNMSINDEATKEQFNELKQRLLEGKSLKSKQVSKVMIDVDSESEDSALSLQDSSANTDESDPDESNVETCTTQLQHSQRVNSRRKSTKAKFLTIPQVHHDDFLSDTFDLIMKEIVQKAGDRSQKVVEWKAPEELRELMDLDPTAVGETHEKLLMRLQDIIKYSVKTGHPRFVNQLFSSLDPYGLAGQIVTDALNTSQYTYETAPVFTLMEETVLKTMRTCIGYTEGNGIFCPGGSLSNIMAVNCARHFMFPQTKKTGMFGLPPLVIYTSELAHYSIKKAGYLLGFGDDNVKLVKTDELGKIIPEDLERQIQETIDEGCTPFMIVATAGTTVFGAFDPIDKMADVAQKYGLWYHVDGAWGGGVLMSKKHRDMMKGVDRADSVTWNPHKLLGVPQQCSCFLTKHVNILQQCHRADAKYLFQKDKFYDTSYDTGDKTFQCGRKVDVLKFWLMWKAKGSEGFEQHIDKLFDNTRYIVEKLKQREGFRMVVNEPDCTNVCFWYVPPSLRNMPEDEEFWNRLHTVAPKVKEGMIRDGTMMITYQPQKDLVNFFRLVLQNSATTYEDMDFFIDEIERLGKFL

SEQ ID NO: 192 - protein, 538 aa, Branchiostoma floridae
MSNILTSLEDSSFSCSCAKEMINGGIDGHLNDCSVRNLKSSLNDDTANVKAPKKDPLPKDEEDFLKAVFQVILEDGVRKGRDITQKVVDFHQPDELRTLLDLEIRDTPEDHQALIKHMKDTVKYSVRTSHPRFFNQLFSGQNTYALAGQWLTETLNTSQYTFEVAPVFTIMENVVLHKMRDIVGYSGGDGIFCPGGSISNLYALNVARYRYMPDIKKTGLFGLPRLVVFTSKQSHYSIKKAASVLGIGTNNVVLVDCDERGKMIASDLEAQILRVKAEGAVPFFVNCTSGTTVLGAYDPLDEVSDICEKHGLWMHVDAAWGGGVMMSPKYRASRMRGVERSDSITWNPHKMMGAGQQCSAFLLKHENLLQHCHEAKAKYLFQQDKFYDVSYDTGDKSIQCGRKVDVFKLWLMWKAKGSQGFHQDMDAIFDKTRYLVEKVKAREGFKMVLDEPECSNVCFWYIPPSLRGKEDEADYKDKLHQVAPRIKERMVLSGTMLVGYQPLGNKPNFFRQVFSSPSVTEEDLDFLLDEIERLGEDL

SEQ ID NO: 193 - protein, 335 aa, Meligethes aeneus
KEMRQIVGFKNGDGDGIFCPGGSMANGYAISCARYKFMPEIKQKGLHALPRLVLFTSRDAHYSIKKLSSFLGIGTDNVYAINTDEKGKMDMKHLEEEVERSIKEGGAPFMVSATSGTTVIGAFDPLEKIHEICQKYGMWMHVDAAWGGGALMSKKHRYLLKGIEKADSVTWNPHKLLTAPQQCSTLLLKQDGILSAMNSANATYLFQKDKFYDTKYDIGDKHIQCGRRPDVIKFWFMWKAKGTSGFEQHIDKVFENAKFFTDTIREREGFEMVIPEPECTNICFWYVPPSLRNRKSDPDYQDKLHKVAPKIKEKMMREGTMMVTYQPLRETPNFF

SEQ ID NO: 194 - protein, 401 aa, Solenopsis invicta
STSGEDRVVEWVDPYELRSVVDLSLPAEGVSHEELLKLTRDVIKYSVKTGHPHFVNQLFSSLDPYGLLGQWLTDALNPSVYTYEVSPVFSLMEEDVLREMRSIIGWHNGEGLFCPGGSMANGYAINLARHHRYPHLKQTGLSQMPRLVVFTSEDAHYSVKKLAAFLGIGYDNVYLAKVDSRGKMVVSDLEAQIARAIEEGAAPLMVSATAGTTVIGAFDPLKDIAEVCKKYGLWFHVDAAWGGGALVSAAYRGLLDGLHLADSVTWNPHKLLAAPQQCSTLLLRHKGLLQAAHGCGASYLFQNDKFYDASFDCGDRHVQCGRRADVVKFWYMWKAKGTRGLEAHVDRVFALSRYFADLIRAREGWHLLVEPECTNVCFRYVPPSKRHLAGQELDQVLHKVS

SEQ ID NO: 195 - protein, 555 aa, Crassostrea gigas
MASCMTESFKVHSCAHKRIHDKNDFEVEPTEKQRITMLSDKPVRKSNKENSMCNVTIKTKESHSENHKKHEKKAPKQEKAKHEFLDKLYEMMIKDGFMKARDRNEKVVEFSYPEELKQKIDFDLGSKTSDEKILSLCQDIIKYSVKVAHPRFFNQLYGGLDEYSLGGCWLTETMNASLYTYEVSPVFSLMERVVIDKMLGKIGFEDGDAMFCPGGSISNMYALNIARYFKYPEVKKKGIKGIPDICAFTSEKCHYSIGKGVAFMGMGLDNLINVKTDANGKMIPEDLEKKILEAKAEGKTPYFVNATAGTTVFGAFDPIDEIADICQKYNLWMHVDGAWGGGALLSKTYSPLLKGVERADSMTWNPHKLMGVPQQCSLVFTKHKGLLEQCHSANASYLFQQDKFYDVSYDTGDKSIQCGRKNDVLKLWIMWKNKGDEGFERDIDNQFECAKYLAQLVQEREGFELMLEPQCTNVCFYYIPKRLRGLERTPEWWNEISKVGPKVKEGMMKAGSMMVGYQPDGDFVNFFRMIISNLDTVKSDMDFVVDEIDRLGKDL

SEQ ID NO: 196 - DNA, 1020 bp, Candida parapsilosis
atggttaactacggcttcgttggtttgggtcagatgggtcaacacatggctagacacatctacaaccaattggaagtcgacgacaagttgtacgtttacgacaccgttccaactgccgttgaccaattcgtttcaaacgttacccagcaaaacgctaccaacaaggagaagttggttaccttgccagacttgaagtccttcgttaccggtgttgacggtcaattggacttcatcgtcaccatggttccagagggtaagcacgtcaagggtgttgttgaggacatcgttacctctttcgaacaaaacggttactccccagactacaacactaccatcatcgactcctccaccatcgacatcccaacctccagacaggttcacgaatacgttaaggaaaccttgcctcaattcgacttcatcgacgcacctgtttccggtggtgttgctggtgccagaaagggcaccttgtccttcatgttgtccagagaaacccaccaagacgtctctccagccttgactaccttgttgaacaagatgggtaagaacatcttcccatgtggtgctacccacggcaccggtttggctgctaagttgtccaacaactacttgttggctgtcaccaacatcgcagttgcagactccttccaattggcaaaggcattcggtttgaacttgcaaaactacgctaagttggttgcagtttccaccggcaagtcttgggcttctgttgacaactgcccaatccctggtgtttacccagaaaacaacttgcctgcagacgttggttaccaaggtggtttcatcaccaagttgaccagaaaggacgttgttttggctaccgactgcgccaaggaccaaggtagattcttgttcttgggtgacgcaggtagatactggtacgacaaggcgtgtgaaagagaagacatcgccaacagagacttggcagttttgtacgaatggttgggtgacttgaagcaagaagcagacggcaccgttgtcgacaccaaggtttccaagtaa

SEQ ID NO: 197 - protein, 339 aa, Candida parapsilosis
MVNYGFVGLGQMGQHMARHIYNQLEVDDKLYVYDTVPTAVDQFVSNVTQQNATNKEKLVTLPDLKSFVTGVDGQLDFIVTMVPEGKHVKGVVEDIVTSFEQNGYSPDYNTTIIDSSTIDIPTSRQVHEYVKETLPQFDFIDAPVSGGVAGARKGTLSFMLSRETHQDVSPALTTLLNKMGKNIFPCGATHGTGLAAKLSNNYLLAVTNIAVADSFQLAKAFGLNLQNYAKLVAVSTGKSWASVDNCPIPGVYPENNLPADVGYQGGFITKLTRKDVVLATDCAKDQGRFLFLGDAGRYWYDKACEREDIANRDLAVLYEWLGDLKQEADGTVVDTKVSK

SEQ ID NO: 198 - DNA, 996 bp, Debaryomyces hansenii
atgaccaactacggcttcatcggtttgggtgaaatgggtcaacacatgggtagacacatctacaacaagttggagccagacgacaagttgtacgtttacgacttggaaccagcaaacaccaagaagttcgtcgacaccgttaccgaagcatcccctgcaaacaagaagttggtcgttccattggaatccatctccgacttcgttcacaaggtcgactcccaattggagttcatcatgaccatggttccagaaggtaagcacgtcaagtccgttgtcgaagagttggtccagaactacaagaagtgtgctaccgacatctccggtgtctccactaccttcttggactcctccaccgtcgacatcccaacctccatcgaagtccacaagtacgtcaagcaacaaatcccagacttcgacttcatcgacaccccagtttccggtggtgttgccggtgccagaaagggcaccttgtccttcatgttgtccagagagacccacgaagacatgtccccatccttgacctccttgttgtccaagatgggcaccaacatcttcccatgtggtaagaaccacggcaccggtttggcagcaaagttgtccaacaactacttgttggctgtcaccaacttggcggtcgcagactccttccaattggcaaagtccttcggtttggacatgaagaactacgctaagttggtctccgtttccaccggtaagtcctgggcttccgttgacaactgtccaatcaaaggcgcttacccaaaggaaaacgacttgccagcagacagagactgccacggtggtttcatcaccaagttggctagaaaggacttggtcttggctacccaatccgcaaagtccaacaacagattcttgttcttgggtgaagtcggtaagaagtggtacgacaaggcttgtgaaagagaagacttggcaaccaaggacttgtccgtcttgtacgaatggttggaagaattgtccgaaaaggacaagtaa

SEQ ID NO: 199 - protein, 331 aa, Debaryomyces hansenii
MTNYGFIGLGEMGQHMGRHIYNKLEPDDKLYVYDLEPANTKKFVDTVTEASPANKKLVVPLESISDFVHKVDSQLEFIMTMVPEGKHVKSVVEELVQNYKKCATDISGVSTTFLDSSTVDIPTSIEVHKYVKQQIPDFDFIDTPVSGGVAGARKGTLSFMLSRETHEDMSPSLTSLLSKMGTNIFPCGKNHGTGLAAKLSNNYLLAVTNLAVADSFQLAKSFGLDMKNYAKLVSVSTGKSWASVDNCPIKGAYPKENDLPADRDCHGGFITKLARKDLVLATQSAKSNNRFLFLGEVGKKWYDKACEREDLATKDLSVLYEWLEELSEKDK

SEQ ID NO: 200 - DNA, 1017 bp, Meyerozyma guilliermondii
atggcaaactacggtttcatcggtttgggtcaaatgggccaacacatggcgagacacatctacaaccaattggaaccaaacgactccttgtacgtccacgacgtctccagagacgcaaccgagaccttcgttaacaccgtcacctccgcttccccagacagaaaggactgtttgaaggcattgtacaacatctccgacttcgttaccggtgttaacgctcaattggactacatcatcaccatggttcctgaaggtagacacgttaagggtgttgttcaacagttgatcgaaacctaccaacaaggtgcaccatccactaccaagactaccatcttggactcatctaccatcgacatcccaacctcaatcgaagttcacaactacgtcaagcagcaaatcccagaattcgacttcatcgacaccccagtcagtggtggcgttgctggtgccagaaagggcaccttgtccttcatgttgtccagaccaaccgacgaatccatctctccttctttgaacaccttgttgaagaagatgggtaagaacatcttcccatgtggtgcaaaccacggtgcaggtttagccgctaagttgtccaacaactacttgttggcagttaccaacttggcggttgccgactccttcagattggctcactccttcggtttggacttggtcaagtactccaagttggttgctgtttccaccggcaagtgttgggctgcagttgacaactgcccaatcccaggtgtctacccagccgagtacagattgccagtcgacgacggttacaacggtggtttcatcaccaagttgaccaagaaggacttggttttggctaccgacgctgctaagttcaacgaccgtttcttgttcatgggtgacgtttccagacactggtacgaaaaggcttgtgaaagagaagacatcgcttccagagacttggcagttttgtacgaatggttgggtgacatggaacaacaagcagacggcaccatcgtcgacaagaaggacgtctaa

SEQ ID NO: 201 - protein, 338 aa, Meyerozyma guilliermondii
MANYGFIGLGQMGQHMARHIYNQLEPNDSLYVHDVSRDATETFVNTVTSASPDRKDCLKALYNISDFVTGVNAQLDYIITMVPEGRHVKGVVQQLIETYQQGAPSTTKTTILDSSTIDIPTSIEVHNYVKQQIPEFDFIDTPVSGGVAGARKGTLSFMLSRPTDESISPSLNTLLKKMGKNIFPCGANHGAGLAAKLSNNYLLAVTNLAVADSFRLAHSFGLDLVKYSKLVAVSTGKCWAAVDNCPIPGVYPAEYRLPVDDGYNGGFITKLTKKDLVLATDAAKFNDRFLFMGDVSRHWYEKACEREDIASRDLAVLYEWLGDMEQQADGTIVDKKDV

SEQ ID NO: 202 - DNA, 1023 bp, Clavispora lusitaniae
atgaagaacttcggcttcatcggtttgggtcaaatgggtcagcacatggctagacacatctacaaccaattggaacctcaagacaccttgtacgtttacgacgcagtcccatccgcaaccgacgcgttcgtcgaaaagaactccaccccagaaaaggcttctcaattggtcccattgaagtccttgtcctccttcgttaccgacgttgactcccaattggacttcatcatcaccatggtcccagaaggtaagcacgtcaaggctgtcatccaagacttggtttcctcctaccaaaagcaaccatccttgcaaccaatgaccttcttggactcctccaccatcgacatctccacctccagagaagttcacgaattcgttaagtccaccatcccatccttcgacttcatcgacaccccagtctctggtggcgttgctggcgctagaaaggcctccttgtccttcatgttgtcccgtgaaaccatcgaagacgtctcccctgctttgacctccttgttgaacaagatgggtaagaacatcttcgcatgcggtccttcccacggttccggcttggcagcaaagttggcaaacaactacttgttggctgtcaccaacttggctgttgcagactccttccaattggcaaacaccttcaacttgaacttgcaacaatacgctaagttggttgctgtttccaccggtaagtcctgggcatccgttgacaactgtccaatcgctggtgcttacccaaaggagtacaacttgccagcagactccggttacgaaggtggtttcatcaccaagttgaccaagaaggacttggttttggcgaccgactgtgctgcggaatacaacagattcttgttcttgggcgacatctccagaaagtggtacttgaaggcatgtgagagagaagacttgggttccagagacttgggcgttttgttcgaatggttgggtcaaatcgaagaaagaaacggtgaagttgttgacaccaagacctccgaaccattgaagatcaactaa

SEQ ID NO: 203 - protein, 340 aa, Clavispora lusitaniae
MKNFGFIGLGQMGQHMARHIYNQLEPQDTLYVYDAVPSATDAFVEKNSTPEKASQLVPLKSLSSFVTDVDSQLDFIITMVPEGKHVKAVIQDLVSSYQKQPSLQPMTFLDSSTIDISTSREVHEFVKSTIPSFDFIDTPVSGGVAGARKASLSFMLSRETIEDVSPALTSLLNKMGKNIFACGPSHGSGLAAKLANNYLLAVTNLAVADSFQLANTFNLNLQQYAKLVAVSTGKSWASVDNCPIAGAYPKEYNLPADSGYEGGFITKLTKKDLVLATDCAAEYNRFLFLGDISRKWYLKACEREDLGSRDLGVLFEWLGQIEERNGEVVDTKTSEPLKIN

SEQ ID NO: 204 - DNA, 23 bp, Issatchenkia occidentalis
cgaaccaattcaagaaaaccaac

SEQ ID NO: 205 - DNA, 25 bp, Issatchenkia occidentalis
ctccttcatttaactataccagacg

SEQ ID NO: 206 - DNA, 20 bp, Issatchenkia occidentalis
gaagggggtccaagttatcc

SEQ ID NO: 207 - DNA, 21 bp, Issatchenkia occidentalis
ccaacaatcttaattggtgac

SEQ ID NO: 208 - DNA, 20 bp, Issatchenkia occidentalis
gatatgggcggtagagaaga

SEQ ID NO: 209 - DNA, 20 bp, Issatchenkia occidentalis
gctccttcaaaggcaacaca

SEQ ID NO: 210 - DNA, 20 bp, Issatchenkia occidentalis
tgattccttcaatcacaggt

SEQ ID NO: 211 - DNA, 25 bp, Issatchenkia occidentalis
gcatgtctgttaactctcaaaccat

SEQ ID NO: 212 - DNA, 20 bp, Issatchenkia occidentalis
agggtaccttagtacgaagg

SEQ ID NO: 213 - DNA, 20 bp, Issatchenkia occidentalis
ctattcttacgatgaaggcg
